(19) United States
(12) Patent Application Publication
(10) Pub. No.: US 2006/0160090 A1
(43) Pub. Date: Jul. 20, 2006

(54) Composition splice variants and methods relating to cancer specific genes and proteins

(76) Inventors: Robert A. Macina, San Jose, CA (US); Leah R. Turner, Sunnyvale, CA (US); Yongming Sun, Redwood City, CA (US); Albert Tam, San Francisco, CA (US)

Correspondence Address: LICATA & TYRRELL P.C., 66 E. MAIN STREET, MARLTON, NJ, 08053, US

(21) Appl. No.: 10/553,436

(22) PCT Filed: Apr. 12, 2004
(86) PCT No.: PCT/US04/11104

§ 371 Date: Mar. 21, 2006

Related U.S. Application Data
(60) Provisional application No. 60/462,399, filed on Apr. 11, 2003.
(60) Provisional application No. 60/484,333, filed on Jul. 1, 2003.

(51) Int. Cl. C12Q 1/68; G01N 33/574; C07H 21/04; C12P 21/06; C07K 14/82; C07K 16/30

(52) U.S. Cl. 435/6; 536/23.5; 435/69.1; 435/320.1; 435/325; 530/350; 530/388.8; 435/7.23

(57) ABSTRACT

The present invention relates to newly identified nucleic acid molecules and polypeptides present in normal and neoplastic cells, including fragments, variants and derivatives of the nucleic acids and polypeptides. The present invention also relates to antibodies to the polypeptides of the invention, as well as agonists and antagonists of the polypeptides of the invention. The invention also relates to compositions containing the nucleic acid molecules, polypeptides, antibodies, agonists and antagonists of the invention and methods for the use of these compositions. These uses include identifying, diagnosing, monitoring, staging, imaging and treating breast, colon, lung, ovarian or prostate cancer and non-cancerous disease states in breast, colon, lung, ovarian or prostate, identifying breast, colon, lung, ovarian or prostate tissue, monitoring and identifying and/or designing agonists and antagonists of polypeptides of the invention. The uses also include gene therapy, production of transgenic animals and cells, and production of engineered normal or cancerous breast, colon, lung, ovarian or prostate tissue for treatment and research.

### FIELD OF THE INVENTION

[0001] The present invention relates to newly identified nucleic acids and polypeptides present in normal and neoplastic cells, including fragments, variants and derivatives of the nucleic acids and polypeptides. The present invention also relates to antibodies to the polypeptides of the invention, as well as agonists and antagonists of the polypeptides of the invention. The invention also relates to compositions comprising the nucleic acids, polypeptides, antibodies, post translational modifications (PTMs), variants, derivatives, agonists and antagonists of the invention and methods for the use of these compositions. These uses include identifying, diagnosing, monitoring, staging, imaging and treating cancer and non-cancerous disease states in breast, colon, lung, ovarian or prostate tissue. These uses include further include identifying breast, colon, lung, ovarian or prostate tissue and monitoring and identifying and/or designing agonists and antagonists of polypeptides of the invention. The uses also include gene therapy, therapeutic molecules including but limited to antibodies or antisense molecules, production of transgenic animals and cells, and production of engineered breast, colon, lung, ovarian or prostate tissue for treatment and research.

### BACKGROUND OF THE INVENTION

[0002] Breast cancer, also referred to as mammary tumor cancer, is the second most common cancer among women, accounting for a third of the cancers diagnosed in the United States. One in nine women will develop breast cancer in her lifetime and about 192,000 new cases of breast cancer are diagnosed annually with about 42,000 deaths. Bevers, Primary Prevention of Breast Cancer, in Breast Cancer, 20-54 (Kelly K Hunt et al., ed., 2001); Kochanek et al., 49 Nat'l. Vital Statistics Reports 1, 14 (2001). Breast cancer is extremely rare in women younger than 20 and is very rare in women under 30. The incidence of breast cancer rises with age and becomes significant by age 50. White Non-Hispanic women have the highest incidence rate for breast cancer and Korean women have the lowest. Increased prevalence of the genetic mutations BRCA1 and BRCA2 that promote breast and other cancers are found in Ashkenazi Jews. African American women have the highest mortality rate for breast cancer among these same groups (31 per 100,000), while Chinese women have the lowest at 11 per 100,000. Although men can get breast cancer, this is extremely rare. In the United States it is estimated there will be 217,440 new cases of breast cancer and 40,580 deaths due to breast cancer in 2004. (American Cancer Society Website: http://www.cancer.org). With the exception of those cases with associated genetic factors, precise causes of breast cancer are not known.

[0003] In the treatment of breast cancer, there is considerable emphasis on detection and risk assessment because early and accurate staging of breast cancer has a significant impact on survival. For example, breast cancer detected at an early stage (stage T0, discussed below) has a five-year survival rate of 92%. Conversely, if the cancer is not detected until a late stage (i.e., stage T4 (IV)), the five-year survival rate is reduced to 13%. AJCC Cancer Staging Handbook pp. 164-65 (Irvin D. Fleming et al. eds., 5^{th} ed. 1998). Some detection techniques, such as mammography and biopsy, involve increased discomfort, expense, and/or radiation, and are only prescribed only to patients with an increased risk of breast cancer.

[0004] Current methods for predicting or detecting breast cancer risk are not optimal. One method for predicting the relative risk of breast cancer is by examining a patient's risk factors and pursuing aggressive diagnostic and treatment regiments for high risk patients. A patient's risk of breast cancer has been positively associated with increasing age, nulliparity, family history of breast cancer, personal history of breast cancer, early menarche, late menopause, late age of first fail term pregnancy, prior proliferative breast disease, irradiation of the breast at an early age and a personal history of malignancy. Lifestyle factors such as fat consumption, alcohol consumption, education, and socioeconomic status have also been associated with an increased incidence of breast cancer although a direct cause and effect relationship has not been established. While these risk factors are statistically significant, their weak association with breast cancer limited their usefulness. Most women who develop breast cancer have none of the risk factors listed above, other than the risk that comes with growing older. NIH Publication No. 00-1556 (2000).

[0005] Current screening methods for detecting cancer, such as breast self exam, ultrasound, and mammography have drawbacks that reduce their effectiveness or prevent their widespread adoption. Breast self exams, while useful, are unreliable for the detection of breast cancer in the initial stages where the tumor is small and difficult to detect by palpation. Ultrasound measurements require skilled operators at an increased expense. Mammography, while sensitive, is subject to over diagnosis in the detection of lesions that have questionable malignant potential. There is also the fear of the radiation used in mammography because prior chest radiation is a factor associated with an increase incidence of breast cancer.

[0006] At this time, there are no adequate methods of breast cancer prevention. The current methods of breast cancer prevention involve prophylactic mastectomy (mastectomy performed before cancer diagnosis) and chemoprevention (chemotherapy before cancer diagnosis) which are drastic measures that limit their adoption even among women with increased risk of breast cancer. Bevers, supra.

[0007] A number of genetic markers have been associated with breast cancer. Examples of these markers include carcinoembryonic antigen (CEA) (Mughal et al., JAMA 249:1881 (1983)), MUC-1 (Frische and Liu, J. Clin. Ligand 22:320 (2000)), HER-2/neu (Haris et al., Proc. Am. Soc. Clin. Oncology 15:A96 (1996)), uPA, PAI-1, LPA, LPC, RAK and BRCA (Esteva and Fritsche, Serum and Tissue Markers for Breast Cancer, in Breast Cancer, 286-308 (2001)). These markers have problems with limited sensitivity, low correlation, and false negatives which limit their use for initial diagnosis. For example, while the BRCA1 gene mutation is useful as an indicator of an increased risk for breast cancer, it has limited use in cancer diagnosis because only 6.2% of breast cancers are BRCA1 positive. Malone et al., JAMA 279:922 (1998). See also, Mewman et al., JAMA 279:915 (1998) (correlation of only 3.3%).

[0008] There are four primary classifications of breast cancer varying by the site of origin and the extent of disease development.
[0009] I. Ductal carcinoma in situ (DCIS): Malignant transformation of ductal epithelial cells that remain in their normal position. DCIS is a purely localized disease, incapable of metastasis.
[0010] II. Invasive ductal carcinoma (IDC): Malignancy of the ductal epithelial cells breaking through the basal membrane and into the supporting tissue of the breast. IDC may eventually spread elsewhere in the body.
[0011] III. Lobular carcinoma in situ (LCIS): Malignancy arising in a single lobule of the breast that fail to extend through the lobule wall, it generally remains localized.

[0012] IV. Infiltrating lobular carcinoma (ILC): Malignancy arising in a single lobule of the breast and invading directly through the lobule wall into adjacent tissues. By virtue of its invasion beyond the lobule wall, ILC may penetrate lymphatics and blood vessels and spread to distant sites.

[0013] For purpose of determining prognosis and treatment, these four breast cancer types have been staged according to the size of the primary tumor (T), the involvement of lymph nodes (N), and the presence of metastasis (M). Although DCIS by definition represents localized stage I disease, the other forms of breast cancer may range from stage II to stage IV. There are additional prognostic factors that further serve to guide surgical and medical intervention. The most common ones are total number of lymph nodes involved, ER (estrogen receptor) status, Her2/neu receptor status and histologic grades.

[0014] Breast cancers are diagnosed into the appropriate stage categories recognizing that different treatments are more effective for different stages of cancer. Stage TX indicates that primary tumor cannot be assessed (i.e., tumor was removed or breast tissue was removed). Stage T0 is characterized by abnormalities such as hyperplasia but with no evidence of primary tumor. Stage Tis is characterized by carcinoma in situ, intraductal carcinoma, lobular carcinoma in situ, or Paget's disease of the nipple with no tumor. Stage T1 (I) is characterized as having a tumor of 2 cm or less in the greatest dimension. Within stage T1, Tmic indicates microinvasion of 0.1 cm or less, T1a indicates a tumor of between 0.1 to 0.5 cm, T1b indicates a tumor of between 0.5 to 1 cm, and T1c indicates tumors of between 1 cm to 2 cm. Stage T2 (II) is characterized by tumors from 2 cm to 5 cm in the greatest dimension. Tumors greater than 5 cm in size are classified as stage T3 (E). Stage T4 (IV) indicates a tumor of any size with extension to the chest wall or skin. Within stage T4, T4a indicates extension of the tumor to the chess wall, T4b indicates edema or ulceration of the skin of the breast or satellite skin nodules confined to the same breast, T4c indicates a combination of T4a and T4b, and T4d indicates inflammatory carcinoma. AJCC Cancer Staging Handbook pp. 159-70 (Irvin D. Fleming et al. eds., 5^{th} ed. 1998). In addition to standard staging, breast tumors may be classified according to their estrogen receptor and progesterone receptor protein status. Fisher et al., Breast Cancer Research and Treatment 7:147 (1986). Additional pathological status, such as HER2/neu status may also be useful. Thor et al., J. Nat'l. Cancer Inst. 90:1346 (1998); Paik et al., J. Nat'l. Cancer Inst. 90:1361 (1998); Hutchins et al., Proc. Am. Soc. Clin. Oncology 17:A2 (1998); and Simpson et al., J. Clin. Oncology 18:2059 (2000).

[0015] In addition to the staging of the primary tumor, breast cancer metastases to regional lymph nodes may be staged. Stage NX indicates that the lymph nodes cannot be assessed (e.g., previously removed). Stage N0 indicates no regional lymph node metastasis. Stage N1 indicates metastasis to movable ipsilateral axillary lymph nodes. Stage N2 indicates metastasis to ipsilateral axillary lymph nodes fixed to one another or to other structures. Stage N3 indicates metastasis to ipsilateral internal mammary lymph nodes. Id.

[0016] Stage determination has potential prognostic value and provides criteria for designing optimal therapy. Simpson et al., J. Clin. Oncology. 18:2059 (2000). Generally, pathological staging of breast cancer is preferable to clinical staging because the former gives a more accurate prognosis. However, clinical staging would be preferred if it were as accurate as pathological staging because it does not depend on an invasive procedure to obtain tissue for pathological evaluation. Staging of breast cancer would be improved by detecting new markers in cells, tissues, or bodily fluids which could differentiate between different stages of invasion. Progress in this field will allow more rapid and reliable method for treating breast cancer patients.

[0017] Treatment of breast cancer is generally decided after an accurate staging of the primary tumor. Primary treatment options include breast conserving therapy (lumpectomy, breast irradiation, and surgical staging of the axilla), and modified radical mastectomy. Additional treatments include chemotherapy, regional irradiation, and, in extreme cases, terminating estrogen production by ovarian ablation.

[0018] Until recently, the customary treatment for all breast cancer was mastectomy. Fonseca et al., Annals of Internal Medicine 127:1013 (1997). However, recent data indicate that less radical procedures may be equally effective, in terms of survival, for early stage breast cancer. Fisher et al., J. of Clinical Oncology 16:441 (1998). The treatment options for a patient with early stage breast cancer (i.e., stage Tis) may be breast-sparing surgery followed by localized radiation therapy at the breast. Alternatively, mastectomy optionally coupled with radiation or breast reconstruction may be employed. These treatment methods are equally effective in the early stages of breast cancer.

[0019] Patients with stage I and stage II breast cancer require surgery with chemotherapy and/or hormonal therapy. Surgery is of limited use in Stage III and stage IV patients. Thus, these patients are better candidates for chemotherapy and radiation therapy with surgery limited to biopsy to permit initial staging or subsequent restaging because cancer is rarely curative at this stage of the disease. AJCC Cancer Staging Handbook 84, 164-65 (Irvin D. Fleming et al. eds., 5^{th} ed. 1998).

[0020] In an effort to provide more treatment options to patients, efforts are underway to define an earlier stage of breast cancer with low recurrence which could be treated with lumpectomy without postoperative radiation treatment. While a number of attempts have been made to classify early stage breast cancer, no consensus recommendation on postoperative radiation treatment has been obtained from these studies. Page et al., Cancer 75:1219 (1995); Fisher et al., Cancer 75:1223 (1995); Silverstein et al., Cancer 77:2267 (1996).

[0021] Cancer of the ovaries is the fourth-most common cause of cancer death in women in the United States, with more than 23,000 new cases and roughly 14,000 deaths predicted for the year 2001. Shridhar, V. et al., Cancer Res. 61(15): 5895-904 (2001); Memarzadeh, S. & Berek, J. S., J. Reprod. Med. 46(7): 621-29 (2001). The American Cancer Society estimates that there will be about 25,580 new cases of ovarian cancer in 2004 in the United States alone. Ovarian cancer will cause about 16,090 deaths in the United States. ACS Website: http://www.cancer.org. The incidence of ovarian cancer is of serious concern worldwide, with an estimated 191,000 new cases predicted annually. Runnebaum, I. B. & Stickeler, E., J. Cancer Res. Clin. Oncol. 127(2): 73-79 (2001). Unfortunately, women with ovarian cancer are typically asymptomatic until the disease has metastasized. Because effective screening for ovarian cancer is not available, roughly 70% of women diagnosed have an advanced stage of the cancer with a five-year survival rate of ˜25-30%. Memarzadeh, S. & Berek, J. S., supra; Nunns, D. et al., Obstet. Gynecol. Surv. 55(12): 746-51. Conversely, women diagnosed with early stage ovarian cancer enjoy considerably higher survival rates. Werness, B. A. & Eltabbakh, G. H., Int'l. J. Gynecol. Pathol. 20(1): 48-63 (2001). Although our understanding of the etiology of ovarian cancer is incomplete, the results of extensive research in this area point to a combination of age, genetics, reproductive, and dietary/environmental factors. Age is a key risk factor in the development of ovarian cancer: while the risk for developing ovarian cancer before the age of 30 is slim, the incidence of ovarian cancer rises linearly between ages 30 to 50, increasing at a slower rate thereafter, with the highest incidence being among septagenarian women. Jeanne M. Schilder et al., Heriditary Ovarian Cancer: Clinical Syndromes and Management, in Ovarian Cancer 182 (Stephen C. Rubin & Gregory P. Sutton eds., 2d ed. 2001).

[0022] With respect to genetic factors, a family history of ovarian cancer is the most significant risk factor in the development of the disease, with that risk depending on the number of affected family members, the degree of their relationship to the woman, and which particular first degree relatives are affected by the disease. Id. Mutations in several genes have been associated with ovarian cancer, including BRCA1 and BRCA2, both of which play a key role in the development of breast cancer, as well as hMSH2 and hMLH1, both of which are associated with heriditary non-polyposis colon cancer. Katherine Y. Look, Epidemiology, Etiology, and Screening of Ovarian Cancer, in Ovarian Cancer 169, 171-73 (Stephen C. Rubin & Gregory P. Sutton eds., 2d ed. 2001). BRCA1, located on chromosome 17, and BRCA2, located on chromosome 13, are tumor supressor genes implicated in DNA repair; mutations in these genes are linked to roughly 10% of ovarian cancers. Id. at 171-72; Schilder et al., supra at 185-86. hMSH2 and hMLH1 are associated with DNA mismatch repair, and are located on chromsomes 2 and 3, respectively; it has been reported that roughly 3% of heriditary ovarian carcinomas are due to mutations in these genes. Look, supra at 173; Schilder et al., supra at 184, 188-89.

[0023] Reproductive factors have also been associated with an increased or reduced risk of ovarian cancer. Late menopause, nulliparity, and early age at menarche have all been linked with an elevated risk of ovarian cancer. Schilder et al., supra at 182. One theory hypothesizes that these factors increase the number of ovulatory cycles over the course of a woman's life, leading to “incessant ovulation,” which is thought to be the primary cause of mutations to the ovarian epithelium. Id.; Laura J. Havrilesky & Andrew Berchuck, Molecular Alterations in Sporadic Ovarian Cancer, in Ovarian Cancer 25 (Stephen C. Rubin & Gregory P. Sutton eds., 2d ed. 2001). The mutations may be explained by the fact that ovulation results in the destruction and repair of that epithelium, necessitating increased cell division, thereby increasing the possibility that an undetected mutation will occur. Id. Support for this theory may be found in the fact pregnancy, lactation, and the use of oral contraceptives, all of which suppress ovulation, confer a protective effect with respect to developing ovarian cancer. Id.

[0024] Among dietary/environmental factors, there would appear to be an association between high intake of animal fat or red meat and ovarian cancer, while the antioxidant Vitamin A, which prevents free radical formation and also assists in maintaining normal cellular differentiation, may offer a protective effect. Look, supra at 169. Reports have also associated asbestos and hydrous magnesium trisilicate (talc), the latter of which may be present in diaphragms and sanitary napkins. Id. at 169-70.

[0025] Current screening procedures for ovarian cancer, while of some utility, are quite limited in their diagnostic ability, a problem that is particularly acute at early stages of cancer progression when the disease is typically asymptomatic yet is most readily treated. Walter J. Burdette, Cancer: Etiology, Diagnosis, and Treatment 166 (1998); Memarzadeh & Berek, supra; Runnebaum & Stickeler, supra; Werness & Eltabbakh, supra. Commonly used screening tests include biannual rectovaginal pelvic examination, radioimmunoassay to detect the CA-125 serum tumor marker, and transvaginal ultrasonography. Burdette, supra at 166.

[0026] Pelvic examination has failed to yield adequate numbers of early diagnoses, and the other methods are not sufficiently accurate. Id. One study reported that only 15% of patients who suffered from ovarian cancer were diagnosed with the disease at the time of their pelvic examination. Look, supra at 174. Moreover, the CA-125 test is prone to giving false positives in pre-menopausal women and has been reported to be of low predictive value in post-menopausal women. Id. at 174-75. Although transvaginal ultrasonography is now the preferred procedure for screening for ovarian cancer, it is unable to distinguish reliably between benign and malignant tumors, and also cannot locate primary peritoneal malignancies or ovarian cancer if the ovary size is normal. Schilder et al., supra at 194-95. While genetic testing for mutations of the BRCA1, BRCA2, hMSH2, and hMLH1 genes is now available, these tests may be too costly for some patients and may also yield false negative or indeterminate results. Schilder et al., supra at 191-94.

[0027] Other markers of interest are HE4 and mesothelin, see Urban et al. Ovarian cancer screening Hematol Oncol Clin North Am. 2003 August;17(4):989-1005; Hellstrom et al. The HE4 (WFDC2) protein is a biomarker for ovarian carcinoma, Cancer Res. 2003 Jul. 1;63(13):3695-700; Ordonez, Application of mesothelin immunostaining in tumor diagnosis, Am J Surg Pathol. 2003 November;27(11):1418-28.

[0028] The staging of ovarian cancer, which is accomplished through surgical exploration, is crucial in determining the course of treatment and management of the disease. AJCC Cancer Staging Handbook 187 (Irvin D. Fleming et al. eds., 5th ed. 1998); Burdette, supra at 170; Memarzadeh & Berek, supra; Shridhar et al., supra. Staging is performed by reference to the classification system developed by the International Federation of Gynecology and Obstetrics. David H. Moore, Primary Surgical Management of Early Epithelial Ovarian Carcinoma, in Ovarian Cancer 203 (Stephen C. Rubin & Gregory P. Sutton eds., 2d ed. 2001); Fleming et al. eds., supra at 188. Stage I ovarian cancer is characterized by tumor growth that is limited to the ovaries and is comprised of three substages. Id. In substage IA, tumor growth is limited to one ovary, there is no tumor on the external surface of the ovary, the ovarian capsule is intact, and no malignant cells are present in ascites or peritoneal washings. Id. Substage IB is identical to A1, except that tumor growth is limited to both ovaries. Id. Substage IC refers to the presence of tumor growth limited to one or both ovaries, and also includes one or more of the following characteristics: capsule rupture, tumor growth on the surface of one or both ovaries, and malignant cells present in ascites or peritoneal washings. Id.

[0029] Stage II ovarian cancer refers to tumor growth involving one or both ovaries, along with pelvic extension. Id. Substage IIA involves extension and/or implants on the uterus and/or fallopian tubes, with no malignant cells in the ascites or peritoneal washings, while substage IIB involves extension into other pelvic organs and tissues, again with no malignant cells in the ascites or peritoneal washings. Id. Substage IIC involves pelvic extension as in IIA or IIB, but with malignant cells in the ascites or peritoneal washings. Id.

[0030] Stage III ovarian cancer involves tumor growth in one or both ovaries, with peritoneal metastasis beyond the pelvis confirmed by microscope and/or metastasis in the regional lymph nodes. Id. Substage IIIA is characterized by microscopic peritoneal metastasis outside the pelvis, with substage IIIB involving macroscopic peritoneal metastasis outside the pelvis 2 cm or less in greatest dimension. Id. Substage IIIC is identical to IIIB, except that the metastasis is greater than 2 cm in greatest dimension and may include regional lymph node metastasis. Id. Lastly, Stage IV refers to the presence distant metastasis, excluding peritoneal metastasis. Id.

[0031] While surgical staging is currently the benchmark for assessing the management and treatment of ovarian cancer, it suffers from considerable drawbacks, including the invasiveness of the procedure, the potential for complications, as well as the potential for inaccuracy. Moore, supra at 206-208, 213. In view of these limitations, attention has turned to developing alternative staging methodologies through understanding differential gene expression in various stages of ovarian cancer and by obtaining various biomarkers to help better assess the progression of the disease. Vartiainen, J. et al., Int'l J. Cancer, 95(5): 313-16 (2001); Shridhar et al. supra; Baekelandt, M. et al., J. Clin. Oncol. 18(22): 3775-81.

[0032] The treatment of ovarian cancer typically involves a multiprong attack, with surgical intervention serving as the foundation of treatment. Dennis S. Chi & William J. Hoskins, Primary Surgical Management of Advanced Epithelial Ovarian Cancer, in Ovarian Cancer 241 (Stephen C. Rubin & Gregory P. Sutton eds., 2d ed. 2001). For example, in the case of epithelial ovarian cancer, which accounts for ˜90% of cases of ovarian cancer, treatment typically consists of: (1) cytoreductive surgery, including total abdominal hysterectomy, bilateral salpingo-oophorectomy, omentectomy, and lymphadenectomy, followed by (2) adjuvant chemotherapy with paclitaxel and either cisplatin or carboplatin. Eltabbakh, G. H. & Awtrey, C. S., Expert Op. Pharmacother. 2(10): 109-24. Despite a clinical response rate of 80% to the adjuvant therapy, most patients experience tumor recurrence within three years of treatment. Id. Certain patients may undergo a second cytoreductive surgery and/or second-line chemotherapy. Memarzadeh & Berek, supra.

[0033] From the foregoing, it is clear that procedures used for detecting, diagnosing, monitoring, staging, prognosticating, and preventing the recurrence of ovarian cancer are of critical importance to the outcome of the patient. Moreover, current procedures, while helpful in each of these analyses, are limited by their specificity, sensitivity, invasiveness, and/or their cost. As such, highly specific and sensitive procedures that would operate by way of detecting novel markers in cells, tissues, or bodily fluids, with minimal invasiveness and at a reasonable cost, would be highly desirable.

[0034] Accordingly, there is a great need for more sensitive and accurate methods for predicting whether a person is likely to develop ovarian cancer, for diagnosing ovarian cancer, for monitoring the progression of the disease, for staging the ovarian cancer, for determining whether the ovarian cancer has metastasized, and for imaging the ovarian cancer. There is also a need for better treatment of ovarian cancer.

[0035] As discussed above, each of the methods for diagnosing and staging ovarian, pancreatic or breast cancer is limited by the technology employed. Accordingly, there is need for sensitive molecular and cellular markers for the detection of ovarian, pancreatic or breast cancer. There is a need for molecular markers for the accurate staging, including clinical and pathological staging, of ovarian, pancreatic or breast cancers to optimize treatment methods. Finally, there is a need for sensitive molecular and cellular markers to monitor the progress of cancer treatments, including markers that can detect recurrence of ovarian, pancreatic or breast cancers following remission.

[0036] Colorectal cancer is the second most common cause of cancer death in the United States and the third most prevalent cancer in both men and women. M. L. Davila & A. D. Davila, Screening for Colon and Rectal Cancer, in Colon and Rectal Cancer 4 (Peter S. Edelstein ed., 2000). The American Cancer-Society estimates that there will be about 106,370 new cases of colon cancer and 46,570 new cases of rectal cancer in the 2004 in the United States alone. Colon cancer and rectal cancer will cause about 56,730 deaths combined in the United States. ACS Website: http://www.cancer.org. Nearly all cases of colorectal cancer arise from adenomatous polyps, some of which mature into large polyps, undergo abnormal growth and development, and ultimately progress into cancer. Davila at 55-56. This progression would appear to take at least 10 years in most patients, rendering it a readily treatable form of cancer if diagnosed early, when the cancer is localized. Davila at 56; Walter J. Burdette, Cancer: Etiology Diagnosis, and Treatment 125 (1998).

[0037] Although our understanding of the etiology of colon cancer is undergoing continual refinement, extensive research in this area points to a combination of factors, including age, hereditary and nonhereditary conditions, and environmental/dietary factors. Age is a key risk factor in the development of colorectal cancer, Davila at 48, with men and women over 40 years of age become increasingly susceptible to that cancer, Burdette at 126. Incidence rates increase considerably in each subsequent decade of life. Davila at 48. A number of hereditary and nonhereditary conditions have also been linked to a heightened risk of developing colorectal cancer, including familial adenomatous polyposis (FAP), hereditary nonpolyposis colorectal cancer (Lynch syndrome or HNPCC), a personal and/or family history of colorectal cancer or adenomatous polyps, inflammatory bowel disease, diabetes mellitus, and obesity. Id. at 47; Henry T. Lynch & Jane F. Lynch, Hereditary Nonpolyposis Colorectal Cancer (Lynch Syndromes), in Colon and Rectal Cancer 67-68 (Peter S. Edelstein ed., 2000).

[0038] Environmental/dietary factors associated with an increased risk of colorectal cancer include a high fat diet, intake of high dietary red meat, and sedentary lifestyle. Davila at 47; Reddy, B. S., Prev. Med. 16(4): 460-7 (1987). Conversely, environmental/dietary factors associated with a reduced risk of colorectal cancer include a diet high in fiber, folic acid, calcium, and hormone-replacement therapy in post-menopausal women. Davila at 50-55. The effect of antioxidants in reducing the risk of colon cancer is unclear. Davila at 53.

[0039] Because colon cancer is highly treatable when detected at an early, localized stage, screening should be a part of routine care for all adults starting at age 50, especially those with first-degree relatives with colorectal cancer. One major advantage of colorectal cancer screening over its counterparts in other types of cancer is its ability to not only detect precancerous lesions, but to remove them as well. Davila at 56. The key colorectal cancer screening tests in use today are fecal occult blood test, sigmoidoscopy, colonoscopy, double-contrast barium enema, and the carcinoembryonic antigen (CEA) test. Burdette at 125; Davila at 56.

[0040] The fecal occult blood test (FOBT) screens for colorectal cancer by detecting the amount of blood in the stool, the premise being that neoplastic tissue, particularly malignant tissue, bleeds more than typical mucosa, with the amount of bleeding increasing with polyp size and cancer stage. Davila at 56-57. While effective at detecting early stage tumors, FOBT is unable to detect adenomatous polyps (premalignant lesions), and, depending on the contents of the fecal sample, is subject to rendering false positives. Davila at 56-59. Sigmoidoscopy and colonoscopy, by contrast, allow direct visualization of the bowel, and enable one to detect, biopsy, and remove adenomatous polyps. Davila at 59-60, 61. Despite the advantages of these procedures, there are accompanying downsides: sigmoidoscopy, by definition, is limited to the sigmoid colon and below, colonoscopy is a relatively expensive procedure, and both share the risk of possible bowel perforation and hemorrhaging. Davila at 59-60. Double-contrast barium enema (DCBE) enables detection of lesions better than FOBT, and almost as well a colonoscopy, but it may be limited in evaluating the winding rectosigmoid region. Davila at 60. The CEA blood test, which involves screening the blood for carcinoembryonic antigen, shares the downside of FOBT, in that it is of limited utility in detecting colorectal cancer at an early stage. Burdette at 125.

[0041] Once colon cancer has been diagnosed, treatment decisions are typically made in reference to the stage of cancer progression. A number of techniques are employed to stage the cancer (some of which are also used to screen for colon cancer), including pathologic examination of resected colon, sigmoidoscopy, colonoscopy, and various imaging techniques. AJCC Cancer Staring Handbook 84 (Irvin D. Fleming et al. eds., 5^{th} ed. 1998); Montgomery, R. C. and Ridge, J. A., Semin. Surg. Oncol. 15(3): 143-150 (1998). Moreover, chest films, liver functionality tests, and liver scans are employed to determine the extent of metastasis. Fleming at 84. While computerized tomography and magnetic resonance imaging are useful in staging colorectal cancer in its later stages, both have unacceptably low staging accuracy for identifying early stages of the disease, due to the difficulty that both methods have in (1) revealing the depth of bowel wall tumor infiltration and (2) diagnosing malignant adenopathy. Thoeni, R. F., Radiol. Clin. N. Am. 35(2): 457-85 (1997). Rather, techniques such as transrectal ultrasound (TRUS) are preferred in this context, although this technique is inaccurate with respect to detecting small lymph nodes that may contain metastases. David Blumberg & Frank G. Opelka, Neoadjuvant and Adjuvant Therapy for Adenocarcinoma of the Rectum, in Colon and Rectal Cancer 316 (Peter S. Edelstein ed., 2000).

[0042] Several classification systems have been devised to stage the extent of colorectal cancer, including the Dukes' system and the more detailed International Union against Cancer-American Joint Committee on Cancer TNM staging system, which is considered by many in the field to be a more useful staging system. Burdette at 126-27. The TNM system, which is used for either clinical or pathological staging, is divided into four stages, each of which evaluates the extent of cancer growth with respect to primary tumor (T), regional lymph nodes (N), and distant metastasis (M). Fleming at 84-85. The system focuses on the extent of tumor invasion into the intestinal wall, invasion of adjacent structures, the number of regional lymph nodes that have been affected, and whether distant metastasis has occurred. Fleming at 81.

[0043] Stage 0 is characterized by in situ carcinoma (Tis), in which the cancer cells are located inside the glandular basement membrane (intraepithelial) or lamina propria (intramucosal). In this stage, the cancer has not spread to the regional lymph nodes (N0), and there is no distant metastasis (M0). In stage I, there is still no spread of the cancer to the regional lymph nodes and no distant metastasis, but the tumor has invaded the submucosa (T1) or has progressed further to invade the muscularis propria (T2). Stage II also involves no spread of the cancer to the regional lymph nodes and no distant metastasis, but the tumor has invaded the subserosa, or the nonperitonealized pericolic or perirectal tissues (T3), or has progressed to invade other organs or structures, and/or has perforated the visceral peritoneum (T4). Stage III is characterized by any of the T substages, no distant metastasis, and either metastasis in 1 to 3 regional lymph nodes (N1) or metastasis in four or more regional lymph nodes (N2). Lastly, stage IV involves any of the T or N substages, as well as distant metastasis. Fleming at 84-85; Burdette at 127.

[0044] Currently, pathological staging of colon cancer is preferable over clinical staging as pathological staging provides a more accurate prognosis. Pathological staging typically involves examination of the resected colon section, along with surgical examination of the abdominal cavity. Fleming at 84. Clinical staging would be a preferred method of staging were it at least as accurate as pathological staging, as it does not depend on the invasive procedures of its counterpart.

[0045] Turning to the treatment of colorectal cancer, surgical resection results in a cure for roughly 50% of patients. Irradiation is used both preoperatively and postoperatively in treating colorectal cancer. Chemotherapeutic agents, particularly 5-fluorouracil, are also powerful weapons in treating colorectal cancer. Other agents include irinotecan and floxuridine, cisplatin, levamisole, methotrexate, interferon-α, and leucovorin. Burdette at 125, 132-33. Nonetheless, thirty to forty percent of patients will develop a recurrence of colon cancer following surgical resection, which in many patients is the ultimate cause of death. Wayne De Vos, Follow-up After Treatment of Colon Cancer, Colon and Rectal Cancer 225 (Peter S. Edelstein ed., 2000). Accordingly, colon cancer patients must be closely monitored to determine response to therapy and to detect persistent or recurrent disease and metastasis.

[0046] The next few paragraphs describe the some of molecular bases of colon cancer. In the case of FAP, the tumor suppressor gene APC (adenomatous polyposis coli), chromosomally located at 5q21, has been either inactivated or deleted by mutation. Alberts et al., Molecular Biology of the Cell 1288 (3d ed. 1994). The APC protein plays a role in a number of functions, including cell adhesion, apoptosis, and repression of the c-myc oncogene. N. R. Hall & R. D. Madoff, Genetics and the Polyp-Cancer Sequence, Colon and Rectal Cancer 8 (Peter S. Edelstein, ed., 2000). Of those patients with colorectal cancer who have normal APC genes, over 65% have such mutations in the cancer cells but not in other tissues. Alberts et al., supra at 1288. In the case of HPNCC, patients manifest abnormalities in the tumor suppressor gene HNPCC, but only about 15% of tumors contain the mutated gene. Id. A host of other genes have also been implicated in colorectal cancer, including the K-ras, N-ras, H-ras and c-myc oncogenes, and the tumor suppressor genes DCC (deleted in colon carcinoma) and p53. Hall & Madoff, supra at 8-9; Alberts et al., supra at 1288.

[0047] Abnormalities in Wg/Wnt signal transduction pathway are also associated with the development of colorectal carcinoma. Taipale, J. and Beachy, P. A. Nature 411: 349-354 (2001). Wnt1 is a secreted protein gene originally identified within mouse mammary cancers by its insertion into the mouse mammary tumor virus (MMTV) gene. The protein is homologous to the wingless (Wg) gene product of Drosophila, in which it functions as an important factor for the determination of dorsal-ventral segmentation and regulates the formation of fly imaginal discs. Wg/Wnt pathway controls cell proliferation, death and differentiation. Taipal (2001). There are at least 13 members in the Wnt family. These proteins have been found expressed mainly in the central nervous system (CNS) of vertebrates as well as other tissues such as mammary and intestine. The Wnt proteins are the ligands for a family of seven transmembrane domain receptors related to the Frizzled gene product in Drosophila. Binding Wnt to Frizzled stimulates the activity of the downstream target, Dishevelled, which in turn inactivates the glycogen synthesase kinase 3β (GSK3β). Taipal (2001). Usually active GSK3β will form a complex with the adenomatous polyposis coli (APC) protein and phosphorylate another complex member, β-catenin. Once phosphorylated, β-catenin is directed to degradation through the ubiquitin pathway. When GSK3β or APC activity is down regulated, β-catenin is accumulated in the cytoplasm and binds to the T-cell factor or lymphocyte excitation factor (Tcf/Lef) family of transcriptional factors. Binding of β-catenin to Tcf releases the transcriptional repression and induces gene transcription. Among the genes regulated by β-catenin are a transcriptional repressor Engrailed, a transforming growth factors (TGF-β) family member Decapentaplegic, and the cytokine Hedgehog in Drosophila. β-Catenin also involves in regulating cell adhesion by binding to α-catenin and E-cadherin. On the other hand, binding of β-catenin to these proteins controls the cytoplasmic β-catenin level and its complexing with TCF. Taipal (2001). Growth factor stimulation and activation of c-src or v-src also regulate β-catenin level by phosphorylation of α-catenin and its related protein, p120^{cas}. When phosphorylated, these proteins decrease their binding to E-cadherin and β-catenin resulting in the accumulation of cytoplasmic β-catenin. Reynolds, A. B. et al. Mol. Cell Biol. 14: 8333-8342 (1994). In colon cancer, c-src enzymatic activity has been shown increased to the level of v-src. Alternation of components in the Wg/Wnt pathway promotes colorectal carcinoma development. The best known modifications are to the APC gene. Nicola S et al. Hum. Mol. Genet 10:721-733 (2001). This germline mutation causes the appearance of hundreds to thousands of adenomatous polyps in the large bowel. It is the gene defect that accounts for the autosomally dominantly inherited FAP and related syndromes. The molecular alternations that occur in this pathway largely involve deletions of alleles of tumor-suppressor genes, such as APC, p53 and Deleted in Colorectal Cancer (DCC), combined with mutational activation of proto-oncogenes, especially c-Ki-ras. Aoki, T. et al. Human Mutat. 3: 342-346 (1994). All of these lead to genomic instability in colorectal cancers.

[0048] Another source of genomic instability in colorectal cancer is the defect of DNA mismatch repair (MMR) genes. Human homologues of the bacterial mutHLS complex (hMSH2, hMLH1, hPMS1, hPMS2 and hMSH6), which is involved in the DNA mismatch repair in bacteria, have been shown to cause the HNPCC (about 70-90% HNPCC) when mutated. Modrich, P. and Lahue, R. Ann Rev. Biochem. 65: 101-133 (1996); and Peltomaki, P. Hum. Mol. Genet 10: 735-740 (2001). The inactivation of these proteins leads to the accumulation of mutations and causes genetic instability that represents errors in the accurate replication of the repetitive mono-, di-, tri- and tetra-nucleotide repeats, which are scattered throughout the genome (microsatellite regions). Jass, J. R. et al. J. Gastroenterol Hepatol 17: 17-26 (2002). Like in the classic FAP, mutational activation of c-Ki-ras is also required for the promotion of MSI in the alternative HNPCC. Mutations in other proteins such as the tumor suppressor protein phosphatase PTEN (Zhou, X. P. et al. Hum. Mol. Genet 11: 445-450 (2002)), BAX (Buttler, L. M. Aus. N. Z. J. Surg. 69: 88-94 (1999)), Caspase-5 (Planck, M. Cancer Genet Cytogenet. 134: 46-54 (2002)), TGFβ-RII (Fallik, D. et al. Gastroenterol Clin Biol. 24: 917-22 (2000)) and IGFII-R (Giovanrucci E. J. Nutr. 131: 3109S-20S (2001)) have also been found in some colorectal tumors possibly as the cause of MMR defect.

[0049] Some tyrosine kinases have been shown up-regulated in colorectal tumor tissues or cell lines like HT29. Skoudy, A. et al. Biochem J. 317 (Pt 1): 279-84 (1996). Focal adhesion kinase (FAK) and its up-stream kinase c-src and c-yes in colonic epithelia cells may play an important role in the promotion of colorectal cancers through the extracellular matrix (ECM) and integrin-mediated signaling pathways. Jessup, J. M. et al., The molecular biology of colorectal carcinoma, in: The Molecular Basis of Human Cancer, 251-268 (Coleman W. B. and Tsongalis G. J. Eds. 2002). The formation of c-src/FAK complexes may coordinately deregulate VEGF expression and apoptosis inhibition. Recent evidences suggest that a specific signal-transduction pathway for cell survival that implicates integrin engagement leads to FAK activation and thus activates PI-3 kinase and akt. In turn, akt phosphorylates BAD and blocks apoptosis in epithelial cells. The activation of c-src in colon cancer may induce VEGF expression through the hypoxia pathway. Other genes that may be implicated in colorectal cancer include Cox enzymes (Ota, S. et al. Aliment Pharmacol. Ther. 16 (Suppl 2): 102-106 (2002)), estrogen (al-Azzawi, F. and Wahab, M. Climacteric 5: 3-14 (2002)), peroxisome proliferator-activated receptor-γ (PPAR-γ) (Gelman, L. et al. Cell Mol Life Sci. 55: 932-943 (1999)), IGF-I (Giovannucci (2001)), thymine DNA glycosylase (TDG) (Hardeland, U. et al. Prog. Nucleic Acid Res. Mol. Biol. 68: 235-253 (2001)) and EGF (Mendelsohn, J. Endocrine-Related Cancer 8: 3-9 (2001)).

[0050] Gene deletion and mutation are not the only causes for development of colorectal cancers. Epigenetic silencing by DNA methylation also accounts for the lost of function of colorectal cancer suppressor genes. A strong association between MSI and CpG island methylation has been well characterized in sporadic colorectal cancers with high MSI but not in those of hereditary origin. In one experiment, DNA methylation of MLH1, CDKN2A, MGMT, THBS1, RARB, APC, and p14ARF genes has been shown in 80%, 55%, 23%, 23%, 58%, 35%, and 50% of 40 sporadic colorectal cancers with high MSI respectively. Yamamoto, H. et al. Genes Chromosomes Cancer 33: 322-325 (2002); and Kim, K. M. et al. Oncogene. 12; 21(35): 5441-9 (2002). Carcinogen metabolism enzymes such as GST, NAT, CYP and MTHFR are also associated with an increased or decreased colorectal cancer risk. Pistorius, S. et al. Kongressbd Dtsch Ges Chir Kongr 118: 820-824 (2001); and Potter, J. D. J. Natl. Cancer Inst. 91: 916-932 (1999).

[0051] From the foregoing, it is clear that procedures used for detecting, diagnosing, monitoring, staging, prognosticating, and preventing the recurrence of colorectal cancer are of critical importance to the outcome of the patient. Moreover, current procedures, while helpful in each of these analyses, are limited by their specificity, sensitivity, invasiveness, and/or their cost. As such, highly specific and sensitive procedures that would operate by way of detecting novel markers in cells, tissues, or bodily fluids, with minimal invasiveness and at a reasonable cost, would be highly desirable.

[0052] Accordingly, there is a great need for more sensitive and accurate methods for predicting whether a person is likely to develop colorectal cancer, for diagnosing colorectal cancer, for monitoring the progression of the disease, for staging the colorectal cancer, for determining whether the colorectal cancer has metastasized, and for imaging the colorectal cancer. Following accurate diagnosis, there is also a need for less invasive and more effective treatment of colorectal cancer.

[0053] Throughout the last hundred years, the incidence of lung cancer has steadily increased, so much so that now in many countries, it is the most common cancer. In fact, lung cancer is the second most prevalent type of cancer for both men and women in the United States and is the most common cause of cancer death in both sexes. Lung cancer deaths have increased ten-fold in both men and women since 1930, primarily due to an increase in cigarette smoking, but also due to an increased exposure to arsenic, asbestos, chromates, chloromethyl ethers, nickel, polycyclic aromatic hydrocarbons and other agents. See Scott, Lung Cancer: A Guide to Diagnosis and Treatment, Addicus Books (2000) and Alberg et al., in Kane et al. (eds.) Biology of Lung Cancer, pp. 11-52, Marcel Dekker, Inc. (1998). The American Cancer Society estimates there will be over 173,000 new cases of lung cancer in 2004. Additionally, there will be an estimated 160,440 deaths from lung cancer in 2004. ACS Website: http://www.cancer.org.

[0054] Lung cancer may result from a primary tumor originating in the lung or a secondary tumor which has spread from another organ such as the bowel or breast. Although there are over a dozen types of lung cancer, over 90% fall into two categories: small cell lung cancer (SCLC) and non-small cell lung cancer (NSCLC). See Scott, supra. About 20-25% of all lung cancers are characterized as SCLC, while 70-80% are diagnosed as NSCLC. Id. A rare type of lung cancer is mesothelioma, which is generally caused by exposure to asbestos, and which affects the pleura of the lung. Lung cancer is usually diagnosed or screened for by chest x-ray, CAT scans, PET scans, or by sputum cytology. A diagnosis of lung cancer is usually confirmed by biopsy of the tissue. Id.

[0055] SCLC tumors are highly metastatic and grow quickly. By the time a patient has been diagnosed with SCLC, the cancer has usually already spread to other parts of the body, including lymph nodes, adrenals, liver, bone, brain and bone marrow. See Scott, supra; Van Houtte et al. (eds.), Progress and Perspective in the Treatment of Lung Cancer, Springer-Verlag (1999). Because the disease has usually spread to such an extent that surgery is not an option, the current treatment of choice is chemotherapy plus chest irradiation. See Van Houtte, supra. The stage of disease is a principal predictor of long-term survival. Less than 5% of patients with extensive disease that has spread beyond one lung and surrounding lymph nodes, live longer than two years. Id. However, the probability of five-year survival is three to four times higher if the disease is diagnosed and treated when it is still in a limited stage, i.e., not having spread beyond one lung. Id.

[0056] NSCLC is generally divided into three types: squamous cell carcinoma, adenocarcinoma and large cell carcinoma. Both squamous cell cancer and adenocarcinoma develop from the cells that line the airways; however, adenocarcinoma develops from the goblet cells that produce mucus. Large cell lung cancer has been thus named because the cells look large and rounded when viewed microscopically, and generally are considered relatively undifferentiated. See Yesner, Atlas of Lung Cancer, Lippincott-Raven (1998).

[0057] Secondary lung cancer is a cancer initiated elsewhere in the body that has spread to the lungs. Cancers that metastasize to the lung include, but are not limited to, breast cancer, melanoma, colon cancer and Hodgitn's lymphoma. Treatment for secondary lung cancer may depend upon the source of the original cancer. In other words, a lung cancer that originated from breast cancer may be more responsive to breast cancer treatments and a lung cancer that originated from the colon cancer may be more responsive to colon cancer treatments.

[0058] The stage of a cancer indicates how far it has spread and is an important indicator of the prognosis. In addition, staging is important because treatment is often decided according to the stage of a cancer. SCLC is divided into two stages: limited disease, i.e., cancer that can only be seen in one lung and in nearby lymph nodes; and extensive disease, i.e., cancer that has spread outside the lung to the chest or to other parts of the body. For most patients with SCLC, the disease has already progressed to lymph nodes or elsewhere in the body at the time of diagnosis. See Scott, supra. Even if spreading is not apparent on the scans, it is likely that some cancer cells may have spread away and traveled through the bloodstream or lymph system. In general, chemotherapy with or without radiotherapy is often the preferred treatment. The initial scans and tests done at first will be used later to see how well a patient is responding to treatment.

[0059] In contrast, non-small cell cancer may be divided into four stages. Stage I is highly localized cancer with no cancer in the lymph nodes. Stage II cancer has spread to the lymph nodes at the top of the affected lung. Stage III cancer has spread near to where the cancer started. This can be to the chest wall, the covering of the lung (pleura), the middle of the chest (mediastinum) or other lymph nodes. Stage IV cancer has spread to another part of the body. Stage I-III cancer is usually treated with surgery, with or without chemotherapy. Stage IV cancer is usually treated with chemotherapy and/or palliative care.

[0060] A number of chromosomal and genetic abnormalities have been observed in lung cancer. In NSCLC, chromosomal aberrations have been described on 3p, 9p, 11p, 15p and 17p, and chromosomal deletions have been seen on chromosomes 7, 11, 13 and 19. See Skarin (ed.), Multimodality Treatment of Lung Cancer, Marcel Dekker, Inc. (2000); Gemmill et al., pp. 465-502, in Kane, supra; Bailey-Wilson et al., pp. 53-98, in Kane, supra. Chromosomal abnormalities have been described on 1p, 3p, 5q, 6q, 8q, 13q and 17p in SCLC. Id. In addition, the loss of the short arm of chromosome 3p has also been seen in greater than 90% of SCLC tumors and approximately 50% of NSCLC tumors. Id.

[0061] A number of oncogenes and tumor suppressor genes have been implicated in lung cancer. See Mabry, pp. 391-412, in Kane, supra and Sclafani et al., pp. 295-316, in Kane, supra. In both SCLC and NSCLC, the p53 tumor suppressor gene is mutated in over 50% of lung cancers. See Yesner, supra. Another tumor suppressor gene, FHIT, which is found on chromosome 3p, is mutated by tobacco smoke. Id.; Skarin, supra. In addition, more than 95% of SCLCs and approximately 20-60% of NSCLCs have an absent or abnormal retinoblastoma (Rb) protein, another tumor suppressor gene. The ras oncogene (particularly K-ras) is mutated in 20-30% of NSCLC specimens and the c-erbB2 oncogene is expressed in 18% of stage 2 NSCLC and 60% of stage 4 NSCLC specimens. See Van Houtte, supra. Other tumor suppressor genes that are found in a region of chromosome 9, specifically in the region of 9p21, are deleted in many cancer cells, including p16^{INK4A} and p15^{INK4B}. See Bailey-Wilson, supra; Sclafani et al., supra. These tumor suppressor genes may also be implicated in lung cancer pathogenesis.

[0062] In addition, many lung cancer cells produce growth factors that may act in an autocrine or paracrine fashion on lung cancer cells. See Siegfried et al., pp. 317-336, in Kane, supra; Moody, pp. 337-370, in Kane, supra and Heasley et al., 371-390, in Kane, supra. In SCLC, many tumor cells produce gastrin-releasing peptide (GRP), which is a proliferative growth factor for these cells. See Skarin, supra. Many NSCLC tumors express epidermal growth factor (EGF) receptors, allowing NSCLC cells to proliferate in response to EGF. Insulin-like growth factor (IGF-I) is elevated in greater than 95% of SCLC and greater than 80% of NSCLC tumors; it is thought to function as an autocrine growth factor. Id. Finally, stem cell factor (SCF, also known as steel factor or kit ligand) and c-Kit (a proto-oncoprotein tyrosine kinase receptor for SCF) are both expressed at high levels in SCLC, and thus may form an autocrine loop that increases proliferation. Id.

[0063] Although the majority of lung cancer cases are attributable to cigarette smoking, most smokers do not develop lung cancer. Epidemiological evidenoe has suggested that susceptibility to lung cancer may be inherited in a Mendelian fashion, and thus have an inherited genetic component. Bailey-Wilson, supra. Thus, it is thought that certain allelic variants at some genetic loci may affect susceptibility to lung cancer. Id. One way to identify which allelic variants are likely to be involved in lung cancer susceptibility, as well as susceptibility to other diseases, is to look at allelic variants of genes that are highly expressed in lung.

[0064] The lung is susceptible to a number of other debilitating diseases as well, including, without limitation, emphysema, pneumonia, cystic fibrosis and asthma. See Stockley (ed.), Molecular Biology of the Lung, Volume I: Emphysema and Infection, Birkhauser Verlag (1999), hereafter Stockley I, and Stockley (ed.), Molecular Biology of the Lung, Volume II: Asthma and Cancer, Birkhauser Verlag (1999), hereafter Stockley II. The cause of many these disorders is still not well understood and there are few, if any, good treatment options for many of these noncancerous lung disorders. Thus, there remains a need to understand various noncancerous lung disorders and to identify treatments for these diseases.

[0065] The development and differentiation of lung tissue during embryonic development is also very important. All of the epithelial cells of the respiratory tract, including those of the lung and bronchi, are derived from the primitive endodermal cells that line the embryonic outpouching. See Yesner, supra. During embryonic development, multipotent endodermal stem cells differentiate into many different types of specialized cells, which include ciliated cells for moving inhaled particles, goblet cells for producing mucus, Kulchitsky's cells for endocrine function, and Clara cells and type II pneumocytes for secreting surfactant protein. Id. Improper development and differentiation may cause respiratory disorders and distress in infants, particularly in premature infants, whose lungs cannot produce sufficient surfactant when they are born. Further, some lung cancer cells, particularly small cell carcinomas, are plastic and can alter their phenotype into a number of cell types, including large cell carcinoma, adenocarcinoma and squamous cell carcinoma. Id. Thus, a better understanding of lung development and differentiation may help facilitate understanding of lung cancer initiation and progression.

[0066] The most common screening tests for lung cancer are chest x-ray and sputum cytology. Randomized controlled trials have not demonstrated a reduction in lung cancer mortality resulting from screening with chest x-ray and/or sputum cytology. Additionally, sputum cytology has not been-shown to be effective when used as an adjunct to annual chest x-ray. Screening with chest x-ray plus sputum cytology appears to detect lung cancer at an earlier stage, but this would be expected in a screening test whether or not it was effective at reducing mortality. Since early detection by current screening methods fails to reduce mortality in lung cancer patients, current lung cancer screening methods are inadequate.

[0067] There are two important potential hazards associated with chest radiography screening. First, false positive test results can lead to an unnecessary invasive procedure, such as percutaneous needle biopsy or thoracotomy. These procedures are costly and due to their invasive nature carry risks of their own. The second hazard with chest radiography screening is overdiagnosis. Overdiagnosis is the diagnosis of a small or slowly growing tumor that would not have become clinically significant had it not been detected by screening. Although overdiagnosis is almost impossible to document in a living individual, autopsy studies suggest that many individuals die with lung cancer rather than from it.

[0068] Additionally, the spectrum of lung cancer type has shifted over the last two decades. Whereas the most common type used to be squamous cell cancer (usually centrally located), the most common type now is adenocarcinoma (usually peripherally located). The latter may be more amenable to early detection by chest x-ray, the limitations of which are described above. In contrast, sputum cytology, is more sensitive in the detection of squamous cell cancer than in detecting adenocarcinoma, and therefore lacks usefulness in detecting the more common adenocarcinomas. Clearly, new highly sensitive non-invasive methods of detecting lung cancer are needed.

[0069] There are intensive efforts to improve lung cancer screening with newer technologies, including low-dose helical computed tomography (LDCT) and molecular techniques. LDCT is far more sensitive than chest radiography. In a recent screening study, CT detected almost 6 times as many stage I lung cancers as chest radiography and most of these tumors were 1 cm or less in diameter. However, the effectiveness of screening with LDCT has not yet been evaluated in a controlled clinical trial.

[0070] There are two potential hazards that must be considered against any potential benefit of screening with IDCT. The more common and familiar hazard is the false positive test result, which may lead to anxiety and invasive diagnostic procedures. A less familiar hazard is overdiagnosis, the diagnosis of a condition that would not have become clinically significant had it not been detected by screening. In the case of screening with LDCT, overdiagnosis could lead to unnecessary diagnosis of lung cancer requiring some combination of surgery, e.g., lobectomy, chemotherapy and radiation therapy. As stated above, overdiagnosis is almost impossible to document in a living individual. In one large study, about one-sixth of all lung cancers found at autopsy had not been clinically recognized before death. Furthermore, autopsy probably fails to detect many small lung cancers that are detectable by CT.

[0071] Current therapies for lung cancer are quite limited. Generally, patient options comprise surgery, radiation therapy, and chemotherapy.

[0072] Depending on the type and stage of a lung cancer, surgery may be used to remove the tumor along with some surrounding lung tissue. A lobectomy refers to a lobe (section) of the lung being removed. If the entire lung is removed, the surgery is called a pneumonectomy. Removing only part of a lobe is known as a segmentectomy or wedge resection.

[0073] If the cancer has spread to the brain, benefit may be gained from removal of the brain metastasis. This involves a craniotomy (surgery through a hole in the skull).

[0074] For radiation therapy several methods exist. External beam radiation therapy uses radiation delivered from outside the body that is focused on the cancer. This type of radiation therapy is most often used to treat a primary lung cancer or its metastases to other organs.

[0075] Brachytherapy uses a small pellet of radioactive material placed directly into the cancerous tissue or into the airway next to the cancer. Radiation therapy is sometimes used as the main (primary) treatment of lung cancer, especially if the general health of the patient is too poor to undergo surgery. Brachytherapy can also be used to help relieve blockage of large airways by cancer.

[0076] Additionally, radiation therapy can be used as a post surgical treatment to kill very small deposits of cancer that cannot be seen or removed during surgery. Radiation therapy can also be used to palliate (relieve) symptoms of lung cancer such as pain, bleeding, difficulty swallowing, and problems caused by brain metastases.

[0077] For chemotherapy, cisplatin or a related drug, carboplatin, are the chemotherapy agents most often used in treating NSCLC. Recent studies found that combining either of these with drugs such as gemcitabine, paclitaxel, docetaxel, etoposide, or vinorelbine appear to be more effective in treating NSCLC.

[0078] Recently, the National Comprehensive Cancer Network (NCCN; www.nccn.org), an alliance of nineteen of the worla's leading cancer centers, announces a major update of the NCCN Non-Small Cell Lung Cancer Clinical Practice Guidelines. The NCCN is widely recognized as a standard for clinical policy in oncology.

[0079] Recently approved targeted therapy, gefitinib (Iressa®, AstraZeneca Pharmaceuticals LP) is now recommended as third-line therapy and as second-line only if the platinum/docetaxel combination was used as first-line therapy.

[0080] The NCCN's Non-Small Cell Lung Cancer (NSCLC) guidelines contain recommendations for administration of chemotherapy to patients with this disease including patient selection criteria and definition of first-, second-, and third-line agents and combinations.

[0081] Chemotherapeutic agents are specified as two-agent regimens for first-line therapy, two agent regimens or single agents for second-line therapy, and one single agent for third-line therapy. Agents used in first- and second-line therapy are: cisplatin (Platinol®, Bristol-Myers Squibb Company), carboplatin (Paraplatin®, Bristol-Myers Squibb Company), paclitaxel (Taxol®, Bristol-Myers Squibb Company), docetaxel (Taxotere®, Aventis Pharmaceuticals Inc.), vinorelbine (Navelbine®, GlaxoSmithKline), gemcitabine (Gemzar®, Eli Lilly and Company), etoposide (Toposar®, Pfizer, Inc.; VePesid®, Bristol-Myers Squibb Company; Etopophos®, Bristol-Myers Squibb Company), irinotecan (Camptosar®, Pfizer, Inc.), vinblastine (Velban®, Eli Lilly and Company), mitomycin (Mutamycin®, Bristol-Myers Squibb Company), and ifosfamide (Ifex®, Bristol-Myers Squibb Company).

[0082] Some of the usual chemotherapy combinations used for patients with SCLC include: EP (etoposide and cisplatin); ET (etoposide and carboplatin); ICE (ifosfamide, carboplatin, and etoposide); and CAV (cyclophosphamide, doxorubicin, and vincristine).

[0083] New drugs such as gemcitabine, paclitaxel, vinorelbine, topotecan, and teniposide have shown promising results in some SCLC studies. Growth factors may be given in conjunction to chemotherapy agents if patient health is good. The administration of growth factors help prevent bone marrow side effects.

[0084] Ongoing or recently completed therapeutic trials for various compounds to treat lung cancer include alitretinoin (Panretin®, Ligand Pharmaceuticals), topotecan HCl (Hycamtin® GlaxoSmithKline), liposomal ether lipid (Elan Pharmaceutical), cantuzumab mertansine (ImmunoGen), Gavax® (Cell Genesys), vincristine (Onco TCS®, Inex Pharmaceuticals); Neovastat® (AEterna Laboratories), squalarine (Genaera), mirostipen (Human Genome Sciences Inc.), Advexin® (Introgen Therapeutics), biricodar dicitrate (Incel®, Vertex Pharmaceuticals), flavopiridol (Aventis), Affintac® (Eli Lilly and Company), pivaloyloxymethylbutyrate (Pivanex®, Titan Pharmaceuticals), tirapazamine (Tirazone®, Sanofi-Synthelabo Pharmaceuticals), irinotecan (Camptosar®, Pharmacia), tezacitabine (Chiron), cisplatin/vinblastine/amifostine (MedImmune), paclitaxel/carboplatin/amifostine (MedImmune), Oncomyc-NG® (AVI BioPharma), exisulind/vinorelbine (Aptosyn®/Navelbine®, Cell Pathyways), tariquidar (QLT), Xyotax® (Cell Therapeutics), PEG-camptothecin (Prothecan®, Enzon), decitabine (SuperGen), Tarceva® (OSI Pharmaceuticals), ABX-EGF (Abgenix), Tocosol Paclitaxel® (Sonus Pharmaceuticals), TheraFabe (Antisoma), minodronate (Yamanouchi Pharmaceutical), exisulind/docetaxel/carboplatin (Aptosyn®/Taxotere®/Paraplatin®, Cell Pathways), exisulind/gemcitabine HCl (Aptosyn®/Gemzar®, Cell Pathways), IMC-C225/carboplatin/paclitaxel (Erbitux®/carboplatin®/paclitaxel®, ImClone Systems), and vinorelbine (Navelbine®, GlaxoSmithKline).

[0085] As indicated above, many therapeutics are recommended for use in combination as a first-line therapy or only if other therapeutics have failed as second-, and third-line agents. While there are many compounds in ongoing or recently completed therapeutic trials, there is great need for additional therapeutic compounds capable of treating early stage and advanced or metastasized lung cancer.

[0086] Accordingly, there is a great need for more sensitive and accurate methods for predicting whether a person is likely to develop lung cancer, for diagnosing lung cancer, for monitoring the progression of the disease, for staging the lung cancer, for determining whether the lung cancer has metastasized and for imaging the lung cancer. There is also a need for better treatment of lung cancer. Further, there is a great need for diagnosing and treating noncancerous lung disorders such as emphysema, pneumonia, lung infection, pulmonary fibrosis, cystic fibrosis and asthma. There is also a need for compositions and methods of using these compositions to identify lung tissue for forensic purposes and for determining whether a particular cell or tissue exhibits lung-specific characteristics.

[0087] Prostate cancer is the most prevalent cancer in men and is the second leading cause of death from cancer among mates in the United States. AJCC Cancer Staging Handbook 203 (Irvin D. Fleming et al. eds., 5^{th} ed. 1998); Walter J. Burdette, Cancer: Etiology, Diagnosis and Treatment 147 (1998). In 1999, it was estimated that 37,000 men in the United States would die as result of prostate cancer. Elizabeth A. Platz et al., & Edward Giovannucci, Epidemiology of and Risk Factors for Prostate Cancer, in Management of Prostate Cancer 21 (Eric A Klein, ed. 2000). More recently, the American Cancer Society estimated there will be 230,110 new cases of prostate cancer and 29,900 deaths in 2004. American Cancer Society website: www.cancer.org. Cancer of the prostate typically occurs in older males, with a median age of 74 years for clinical diagnosis. Burdette, supra at 147. A man's risk of being diagnosed with invasive prostate cancer in his lifetime is one in six. Platz et al., supra at 21.

[0088] Although our understanding of the etiology of prostate cancer is incomplete, the results of extensive research in this area point to a combination of age, genetic and environmental/dietary factors. Platz et al., supra at 19; Burdette, supra at 147; Steven K. Clinton, Diet and Nutrition in Prostate Cancer Prevention and Therapy, in Prostate Cancer: a Multidisciplinary Guide 246-269 (Philip W. Kantoff et al. eds. 1997). Broadly speaking, genetic risk factors predisposing one to prostate cancer include race and a family history of the disease. Platz et al., supra at 19, 28-29, 32-34. Aside from these generalities, a deeper understanding of the genetic basis of prostate cancer has remained elusive. Considerable research has been directed to studying the link between prostate cancer, androgens, and androgen regulation, as androgens play a crucial role in prostate growth and differentiation. Meena Augustus et al., Molecular Genetics and Markers of Progression, in Management of Prostate Cancer 59 (Eric A Klein ed. 2000). While a number of studies have concluded that prostate tumor development is linked to elevated levels of circulating androgen (e.g., testosterone and dihydrotestosterone), the genetic determinants of these levels remain unknown. Platz et al., supra at 29-30.

[0089] Several studies have explored a possible link between prostate cancer and the androgen receptor (AR) gene, the gene product of which mediates the molecular and cellular effects of testosterone and dihydrotestosterone in tissues responsive to androgens. Id. at 30. Differences in the number of certain trinucleotide repeats in exon 1, the region involved in transactivational control, have been of particular interest. Augustus et al., supra at 60. For example, these studies have revealed that as the number of CAG repeats decreases the transactivation ability of the gene product increases, as does the risk of prostate cancer. Platz et al., supra at 30-31. Other research has focused on the α-reductase Type 2 gene, the gene which codes for the enzyme that converts testosterone into dihydrotestosterone. Id. at 30. Dihydrotestosterone has greater affinity for the AR than testosterone, resulting in increased transactivation of genes responsive t androgens. Id. While studies have reported differences among the races in the length of a TA dinucleotide repeat in the 3′ untranslated region, no link has been established between the length of that repeat and prostate cancer. Id. Interestingly, while ras gene mutations are implicated in numerous other cancers, such mutations appear not to play a significant role in prostate cancer, at least among Caucasian males. Augustus, supra at 52.

[0090] Environmental/dietary risk factors which may increase the risk of prostate cancer include intake of saturated fat and calcium. Platz et al., supra at 19, 25-26. Conversely, intake of selenium, vitamin E and tomato products (which contain the carotenoid lycopene) apparently decrease that risk. Id. at 19, 26-28 The impact of physical activity, cigarette smoking, and alcohol consumption on prostate cancer is unclear. Platz et al., supra at 23-25.

[0091] Periodic screening for prostate cancer is most effectively performed by digital rectal examination (DRE) of the prostate, in conjunction with determination of the serum level of prostate-specific antigen PSA). Burdette, supra at 148. While the merits of such screening are the subject of considerable debate, Jerome P. Richie & Irving D. Kaplan, Screening for Prostate Cancer: The Horns of a Dilemma, in Prostate Cancer: A Multidisciplinary Guide 1-10 (Philip W. Kantoff et al. eds. 1997), the American Cancer Society and American Urological Association recommend that both of these tests be performed annually on men 50 years or older with a life expectancy of at least 10 years, and younger men at high risk for prostate cancer. Ian M. Thompson & John Foley, Screening for Prostate Cancer, in Management of Prostate Cancer 71 (Eric A Klein ed. 2000). If necessary, these screening methods may be followed by additional tests, including biopsy, ultrasonic imaging, computerized tomography, and magnetic resonance imaging. Christopher A. Haas & Martin I. Resnick, Trends in Diagnosis, Biopsy, and Imaging, in Management of Prostate Cancer 89-98 (Eric A Klein ed. 2000); Burdette, supra at 148.

[0092] Once the diagnosis of prostate cancer has been made, treatment decisions for the individual are typically linked to the stage of prostate cancer present in that individual, as well as his age and overall health. Burdette, supra at 151. One preferred classification system for staging prostate cancer was developed by the American Urological Association (AUA). Id. at 148. The AUA classification system divides prostate tumors into four broad: stages, A to D, which are in turn accompanied by a number of smaller substages. Burdette, supra at 152-153; Anthony V. D'Amico et al., The Staging of Prostate Cancer, in Prostate Cancer: A Multidisciplinary Guide 41 (Philip W. Kantoff et al. eds. 1997).

[0093] Stage A prostate cancer refers to the presence of microscopic cancer within the prostate gland. D'Amico, supra at 41. This stage is comprised of two substages: A1, which involves less than four well-differentiated cancer foci within the prostate, and A2, which involves greater than three well-differentiated cancer foci or alternatively, moderately to poorly differentiated foci within the prostate. Burdette, supra at 152; D'Amico, supra at 41. Treatment for stage A1 preferentially involves following PSA levels and periodic DRE. Burdette, supra at 151. Should PSA levels rise, preferred treatments include radical prostatectomy in patients 70 years of age and younger, external beam radiotherapy for patients between 70 and 80 years of age, and hormone therapy for those over 80 years of age. Id.

[0094] Stage B prostate cancer is characterized by the presence of a palpable lump within the prostate. Burdette, supra at 152-53; D'Amico, supra at 41. This stage is comprised of three substages: B1, in which the lump is less than 2 cm and is contained in one lobe of the prostate; B2, in which the lump is greater than 2 cm yet is still contained within one lobe; and B3, in which the lump has spread to both lobes. Burdette, supra, at 152-53. For stages B1 and B2, the treatment again involves radical prostatectomy in patients 70 years of age and younger, external beam radiotherapy for patients between 70 and 80 years of age, and hormone therapy for those over 80 years of age. Id. at 151. In stage B3, radical prostatectomy is employed if the cancer is well-differentiated and PSA levels are below 15 ng/mL; otherwise, external beam radiation is the chosen treatment option. Id.

[0095] Stage C prostate cancer involves a substantial cancer mass accompanied by extraprostatic extension. Burdette, supra at 153; D'Amico, supra at 41. Like stage A prostate cancer, Stage C is comprised of two substages: substage C1, in which the tumor is relatively minimal, with minor prostatic extension, and substage C2, in which the tumor is large and bulky, with major prostatic extension. Id. The treatment of choice for both substages is external beam radiation. Burdette, supra at 151.

[0096] The fourth and final stage of prostate cancer, Stage D, describes the extent to which the cancer has metastasized. Burdette, supra at 153; D'Amico, supra at 41. This stage is comprised of four substages: (1) D0, in which acid phophatase levels are persistently high, (2) D1, in which only the pelvic lymph nodes have been invaded, (3) D2, in which the lymph nodes above the aortic bifurcation have been invaded, with or without distant metastasis, and (4) D3, in which the metastasis progresses despite intense hormonal therapy. Id. Treatment at this stage may involve hormonal therapy, chemotherapy, and removal of one or both testes. Burdette, supra at 151.

[0097] Despite the need for accurate staging of prostate cancer, current staging methodology is limited. The wide variety of biological behavior displayed by neoplasms of the prostate has resulted in considerable difficulty in predicting and assessing the course of prostate cancer. Augustus et al., supra at 47. Indeed, despite the fact that most prostate cancer patients have carcinomas that are of intermediate grade and stage, prognosis for these types of carcinomas is highly variable. Andrew A Renshaw & Christopher L. Corless, Prognostic Features in the Pathology of Prostate Cancer, in Prostate Cancer: A Multidisciplinary Guide 26 (Philip W. Kantoff et al. eds. 1997). Techniques such as transrectal ultrasound, abdominal and pelvic computerized tomography, and MRI have not been particularly useful in predicting local tumor extension. D'Amico, supra at 53 (editors' comment). While the use of serum PSA in combination with the Gleason score is currently the most effective method of staging prostate cancer, id., PSA is of limited predictive value, Augustus et al., supra at 47; Renshaw et al., supra at 26, and the Gleason score is prone to variability and error, King, C. R. & Long, J. P., Int'l. J. Cancer 90(6): 326-30 (2000). As such, the current focus of prostate cancer research has been to obtain biomarkers to help better assess the progression of the disease. Augustus et al., supra at 47; Renshaw et al., supra at 26; Pettaway, C. A., Tech. Urol. 4(1): 35-42 (1998).

[0098] Accordingly, there is a great need for more sensitive and accurate methods for predicting whether a person is likely to develop prostate cancer, for diagnosing prostate cancer, for monitoring the progression of the disease, for staging the prostate cancer, for determining whether the prostate cancer has metastasized and for imaging the prostate cancer. There is also a need for better treatment of prostate cancer.

[0099] The present invention provides alternative methods of treating ovarian, pancreatic, breast, colon, lung or postate cancer that overcome the limitations of conventional therapeutic methods as well as offer additional advantages that will be apparent from the detailed description below.

[0100] Growth and metastasis of solid tumors are also dependent on angiogenesis. Folkman, J., 1986, Cancer Research, 46, 467-473; Folkman, J., 1989, Journal of the National Cancer Institute, 82, 4-6. It has been shown, for example, that tumors which enlarge to greater than 2 mm must obtain their own blood supply and do so by inducing the growth of new capillary blood vessels. Once these new blood vessels become embedded in the tumor, they provide a means for tumor cells to enter the circulation and metastasize to distant sites such as liver, lung or bone. Weidner, N., et al., 1991, The New England Journal of Medicine, 324(1), 1-8.

[0101] Angiogenesis, defined as the growth or sprouting of new blood vessels from existing vessels, is a complex process that primarily occurs during embryonic development. The process is distinct from vasculogenesis, in that the new endothelial cells lining the vessel arise from proliferation of existing cells, rather than differentiating from stem cells. The process is invasive and dependent upon proteolyisis of the extracellular matrix (ECM), migration of new endothelial cells, and synthesis of new matrix components. Angiogenesis occurs during embryogenic development of the circulatory system; however, in adult humans, angiogenesis only occurs as a response to a pathological condition (except during the reproductive cycle in women).

[0102] Under normal physiological conditions in adults, angiogenesis takes place only in very restricted situations such as hair growth and wounding healing. Auerbach, W. and Auerbach, R., 1994, Pharmacol Ther. 63(3):265-3 11; Ribatti et al., 1991, Haematologica 76(4):3 11-20; Risau, 1997, Nature 386(6626):67 1-4. Angiogenesis progresses by a stimulus which results in the formation of a migrating column of endothelial cells. Proteolytic activity is focused at the advancing tip of this “vascular sprout”, which breaks down the ECM sufficiently to permit the column of cells to infiltrate and migrate. Behind the advancing front, the endothelial cells differentiate and begin to adhere to each other, thus forming a new basement membrane. The cells then cease proliferation and finally define a lumen for the new arteriole or capillary.

[0103] Unregulated angiogenesis has gradually been recognized to be responsible for a wide range of disorders, including, but not limited to, cancer, cardiovascular disease, rheumatoid arthritis, psoriasis and diabetic retinopathy. Folkman, 1995, Nat Med 1(1):27-31; Isner, 1999, Circulation 99(13): 1653-5; Koch, 1998, Arthritis Rheum 41(6):951-62; Walsh, 1999, Rheumatology (Oxford) 38(2):103-12; Ware and Simons, 1997, Nat Med 3(2): 158-64.

[0104] Of particular interest is the observation that angiogenesis is required by solid tumors for their growth and metastases. Folkman, 1986 supra; Folkman 1990, J. Natl. Cancer Inst., 82(1) 4-6; Folkman, 1992, Semin Cancer Biol 3(21):65-71; Zetter, 1998, Annu Rev Med 49:407-24. A tumor usually begins as a single aberrant cell which can proliferate only to a size of a few cubic millimeters due to the distance from available capillary beds, and it can stay ‘dormant’ without further growth and dissemination for a long period of time. Some tumor cells then switch to the angiogenic phenotype to activate endothelial cells, which proliferate and mature into new capillary blood vessels. These newly formed blood vessels not only allow for continued growth of the primary tumor, but also for the dissemination and recolonization of metastatic tumor cells. The precise mechanisms that control the angiogenic switch is not well understood, but it is believed that neovascularization of tumor mass results from the net balance of a multitude of angiogenesis stimulators and inhibitors Folkman, 1995, supra.

[0105] One of the most potent angiogenesis inhibitors is endostatin identified by O'Reilly and Folkman. O'Reilly et al., 1997, Cell 88(2):277-85; O'Reilly et al., 1994, Cell 79(2):3 15-28. Its discovery was based on the phenomenon that certain primary tumors can inhibit the growth of distant metastases. O'Reilly and Folkman hypothesized that a primary tumor initiates angiogenesis by generating angiogenic stimulators in excess of inhibitors. However, angiogenic inhibitors, by virtue of their longer half life in the circulation, reach the site of a secondary tumor in excess of the stimulators. The net result is the growth of primary tumor and inhibition of secondary tumor. Endostatin is one of a growing list of such angiogenesis inhibitors produced by primary tumors. It is a proteolytic fragment of a larger protein: endostatin is a 20 kDa fragment of collagen XVIII (amino acid H1132-K1315 in murine collagen XVIII). Endostatin has been shown to specifically inhibit endothelial cell proliferation in vitro and block angiogenesis in vivo. More importantly, administration of endostatin to tumor-bearing mice leads to significant tumor regression, and no toxicity or drug resistance has been observed even after multiple treatment cycles. Boehm et al., 1997, Nature 390(6658):404-407. The fact that endostatin targets genetically stable endothelial cells and inhibits a variety of solid tumors makes it a very attractive candidate for anticancer therapy. Fidler and Ellis, 1994, Cell 79(2):185-8; Gastl et al., 1997, Oncology 54(3):177-84; Hinsbergh et al., 1999, Ann Oncol 10 Suppl 4:60-3. In addition, angiogenesis inhibitors have been shown to be more effective when combined with radiation and chemotherapeutic agents. Klement, 2000, J. Clin. Invest, 105(8) R15-24. Browder, 2000, Cancer Res. 6-(7) 1878-86, Arap et al., 1998, Science 279(5349):377-80; Mauceri et al., 1998, Nature 394(6690):287-91.

### SUMMARY OF THE INVENTION

[0106] The present invention solves many needs in the art by providing nucleic acid molecules, polypeptides and antibodies thereto, variants and derivatives of the nucleic acids and polypeptides, agonists and antagonists that may be used to identify, diagnose, monitor, stage, image and treat cancer and non-cancerous disease states in breast, colon, lung, ovarian or prostate; identify and monitor breast, colon, lung, ovarian or prostate tissue; and identify and design agonists and antagonists of polypeptides of the invention. The invention also provides gene therapy, methods for producing transgenic animals and cells, and methods for producing engineered breast, colon, lung, ovarian or prostate tissue for treatment and research.

[0107] One aspect of the present invention relates to nucleic acid molecules that are specific to cancer cells, cancer tissue and/or a cancerous organ. These cancer specific nucleic acids (CaSNAs) may be a naturally occurring cDNA, genomic DNA, RNA, or a fragment of one of these nucleic acids, or may be a non-naturally occurring nucleic acid molecule. If the CaSNA is genomic DNA, then the CaSNA is a cancer specific gene (CaSG). If the CaSNA is RNA, then it is a cancer specific transcript encoded by a CaSG. Due to alternative splicing and transcriptional modification one CaSG may encode for multiple cancer specific RNAs. In a preferred embodiment, the nucleic acid molecule encodes a polypeptide that is specific to cancer from breast, colon, lung, ovarian or prostate tissue. More preferred is a nucleic acid molecule that encodes a polypeptide comprising an amino acid sequence of SEQ ID NO: 142-361. In another preferred embodiment, the nucleic acid molecule comprises a nucleic acid sequence of SEQ ID NO: 1-141. For the CaSNA sequences listed herein, DEX0477_{—}001.nt.1 corresponds to SEQ ID NO: 1. For sequences with multiple splice variants, the parent sequence DEX0477_{—}001.nt.1, will be followed by DEX0477_{—}001.nt.2, etc. for each splice variant. The sequences off the corresponding peptides are listed as DEX0477_{—}001.aa.1, etc. For the mapping of all of the nucleotides and peptides, see the table in the Example 1 section below.

[0108] This aspect of the present invention also relates to nucleic acid molecules that selectively hybridize or exhibit substantial sequence similarity to nucleic acid molecules encoding a Cancer Specific Protein (CaSP), or that selectively hybridize or exhibit substantial sequence similarity to a CaSNA. In one embodiment of the present invention the nucleic acid molecule comprises an allelic variant of a nucleic acid molecule encoding a CaSP, or an allelic variant of a CaSNA. In another embodiment, the nucleic acid molecule comprises a part of a nucleic acid sequence that encodes a CaSP or a part of a nucleic acid sequence of a CaSNA.

[0109] In addition, this aspect of the present invention relates to a nucleic acid molecule further comprising one or more expression control sequences controlling the transcription and/or translation of all or a part of a CaSNA or the transcription and/or translation of a nucleic acid molecule that encodes all or a fragment of a CaSP.

[0110] Another aspect of the present invention relates to vectors and/or host cells comprising a nucleic acid molecule of this invention. In a preferred embodiment, the nucleic acid molecule of the vector and/or host cell encodes all or a fragment of a CaSP. In another preferred embodiment, the nucleic acid molecule of the vector and/or host cell comprises all or a part of a CaSNA. Vectors and host cells of the present invention are useful in the recombinant production of polypeptides, particularly CaSPs of the present invention.

[0111] Another aspect of the present invention relates to polypeptides encoded by a nucleic acid molecule of this invention. The polypeptide may comprise either a fragment or a full-length protein. In a preferred embodiment, the polypeptide is a CaSP. However, this aspect of the present invention also relates to mutant proteins (muteins) of CaSPs, fusion proteins of which a portion is a CaSP, and proteins and polypeptides encoded by allelic variants of a CaSNA as provided herein.

[0112] A further aspect of the present invention is a novel splice variant which encodes an amino acid sequence that provides a novel region to be targeted for the generation of reagents that can be used in the detection and/or treatment of cancer. The novel amino acid sequence may lead to a unique protein structure, protein subcellular localization, biochemical processing or function. This information can be used to directly or indirectly facilitate the generation of additional or novel therapeutics or diagnostics. The nucleotide sequence in this novel splice variant can be used as a nucleic acid probe for the diagnosis and/or treatment of cancer.

[0113] Another aspect of the present invention relates to antibodies and other binders that specifically bind to a polypeptide of the instant invention. Accordingly antibodies or binders of the present invention specifically bind to CaSPs, muteins, fusion proteins, and/or homologous-proteins or polypeptides encoded by allelic variants of an CaSNA as provided herein.

[0114] Another aspect of the present invention relates to agonists and antagonists of them nucleic acid molecules and polypeptides of this invention. The agonists and antagonists of the instant invention may be used to treat cancer and non-cancerous disease states in breast, colon, lung, ovarian or prostate tissue and to produce engineered breast, colon, lung, ovarian or prostate tissue.

[0115] Another aspect of the present invention relates to methods for using the nucleic acid molecules to detect or amplify nucleic acid molecules that have similar or identical nucleic acid sequences compared to the nucleic acid molecules described herein. Such methods are useful in identifying, diagnosing, monitoring, staging, imaging and treating cancer and non-cancerous disease states in breast, colon, lung, ovarian or prostate tissue. Such methods are also useful in identifying and/or monitoring breast, colon, lung, ovarian or prostate tissue. In addition, measurement of levels of one or more of the nucleic acid molecules of this invention may be useful for diagnostics as part of panel in combination with known other markers, particularly those described in the cancer background section above.

[0116] Another aspect of the present invention relates to use of the nucleic acid molecules of this invention in gene therapy, for producing transgenic animals and cells, and for producing engineered breast, colon, lung, ovarian or prostate tissue for treatment and research.

[0117] Another aspect of the present invention relates to methods for detecting polypeptides this invention, preferably using antibodies thereto. Such methods are useful to identify, diagnose, monitor, stage, image and treat cancer and non-cancerous disease states in breast, colon, lung, ovarian or prostate tissue. In addition, measurement of levels of one or more of the polypeptides of this invention may be useful to identify, diagnose, monitor, stage, image cancer in combination with known other markers, particularly those described in the cancer background section above. The polypeptides of the present invention can also be used to identify and/or monitor breast, colon, lung, ovarian or prostate tissue, and to produce engineered breast, colon, lung, ovarian or prostate tissue.

[0118] Yet another aspect of the present invention relates to a computer readable means of storing the nucleic acid and amino acid sequences of the invention. The records of the computer readable means can be accessed for reading and displaying of sequences for comparison, alignment and ordering of the sequences of the invention to other sequences. In addition, the computer records regarding the nucleic acid and/or amino acid sequences and/or measurements of their levels may be used alone or in combination with other markers to diagnose breast, colon, lung, ovarian or prostate related diseases including cancer.

### BRIEF DESCRIPTION OF THE FIGURES

[0119] FIG. 1 displays an alignment of the DNA sequences for DEX0477_{—}016.nt.1 (Pcan057) and DEX0477_{—}016.nt.2 (Pcan057v1);

[0120] FIG. 2 displays an alignment of the protein sequences for DEX0477_{—}016.aa.1 (Pcan057.aa) and DEX0477_{—}016.aa3 (Pcan057v1.aa);

[0121] FIG. 3 displays an alignment of the DNA sequences for DEX0477_{—}001.nt.1 (Pro108) and DEX0477_{—}001.nt.2 (Pro177);

[0122] FIG. 4 displays and alignment of the protein sequences for DEX0477_{—}001.aa.1 (Pro108.aa) and DEX0477_{—}001.aa.3 (Pro177.aa);

[0123] FIG. 5 displays an alignment of the protein sequences for DEX0477_{—}001.aa.1 (Pro108.aa) and DEX0477_{—}001.aa.2 (Pro177.orf).

### DETAILED DESCRIPTION OF THE INVENTION

Definitions and General Techniques

[0124] Unless otherwise defined herein, scientific and technical terms used in connection with the present invention shall have the meanings that are commonly understood by those of ordinary skill in the art. Further, unless otherwise required by context, singular terms shall include pluralities and plural terms shall include the singular. Generally, nomenclatures used in connection with, and techniques of, cell and tissue culture, molecular biology, immunology, microbiology, genetics and protein and nucleic acid chemistry and hybridization described herein are those well known and commonly used in the art. The methods and techniques of the present invention are generally performed according to conventional methods well known in the art and as described in various general and more specific references that are cited and discussed throughout the present specification unless otherwise indicated. See, e.g., Sambrook et al., Molecular Cloning: A Laboratory Manual. 2d ed., Cold Spring Harbor Laboratory Press (1989) and Sambrook et al., Molecular Cloning: A Laboratory Manual, 3d ed., Cold Spring Harbor Press (2001); Ausubel et al., Current Protocols in Molecular Biology, Greene Publishing Associates (1992, and Supplements to 2000); Ausubel et al., Short Protocols in Molecular Biology: A Compendium of Methods from Current Protocols in Molecular Biology—4^{th} Ed. Wiley & Sons (1999); Harlow and Lane, Antibodies: A Laboratory Manual, Cold Spring Harbor Laboratory Press (1990); and Harlow and Lane, Using Antibodies: A Laboratory Manual, Cold Spring Harbor Laboratory Press (1999).

[0125] Enzymatic reactions and purification techniques are performed according to manufacturer's specifications, as commonly accomplished in the art or as described herein. The nomenclatures used in connection with, and the laboratory procedures and techniques of, analytical chemistry, synthetic organic chemistry, and medicinal and pharmaceutical chemistry described herein are those well known and commonly used in the art. Standard techniques are used for chemical syntheses, chemical analyses, pharmaceutical preparation, formulation, and delivery, and treatment of patients.

[0126] The following terms, unless otherwise indicated, shall be understood to have the following meanings:

[0127] A “nucleic acid molecule” of this invention refers to a polymeric form of nucleotides and includes both sense and antisense strands of RNA, cDNA, genomic DNA, and synthetic forms and mixed polymers of the above. A nucleotide refers to a ribonucleotide, deoxynucleotide or a modified form of either type of nucleotide. A “nucleic acid molecule” as used herein is synonymous with “nucleic acid” and “polynucleotide.” The term “nucleic acid molecule” usually refers to a molecule of at least 10 bases in length, unless otherwise specified. The term includes single and double stranded forms of DNA. In addition, a polynucleotide may include either or both naturally occurring and modified nucleotides linked together by naturally occurring and/or non-naturally occurring nucleotide linkages.

[0128] Nucleotides are represented by single letter symbols in nucleic acid molecule sequences. The following table lists symbols identifying nucleotides or groups of nucleotides which may occupy the symbol position on a nucleic acid molecule. See Nomenclature Committee of the International Union of Biochemistry (NC-TUB), Nomenclature for incompletely specified bases in nucleic acid sequences,

[0129] Recommendations 1984 ., Eur J Biochem. 150(1):1-5(1985).

| | | | Complementary |
|---|---|---|---|
| Symbol | Meaning | Group/Origin of Designation | Symbol |
| a | a | Adenine | t/u |
| g | g | Guanine | c |
| c | c | Cytosine | g |
| t | t | Thymine | a |
| u | u | Uracil | a |
| r | g or a | puRine | y |
| y | t/u or c | pYrimidine | r |
| m | a or c | aMino | k |
| k | g or t/u | Keto | m |
| s | g or c | Strong interactions 3H-bonds | w |
| w | a or t/u | Weak interactions 2H-bonds | s |
| b | g or c or t/u | not a | v |
| d | a or g or t/u | not c | h |
| h | a or c or t/u | not g | d |
| v | a or g or c | not t, not u | b |
| n | a or g or c | aNy | n |
| | or t/u, | | |
| | unknown, or | | |
| | other | | |

[0130] The nucleic acid molecules may be modified chemically or biochemically or may contain non-natural or derivatized nucleotide bases, as will be readily appreciated by those of skill in the art. Such modifications include, for example, labels, methylation, substitution of one or more of the naturally occurring nucleotides with an analog, internucleotide modifications such as uncharged linkages (e.g., methyl phosphonates, phosphotriesters, phosphoramidates, carbamates, etc.), charged linkages (e.g., phosphorothioates, phosphorodithioates, etc.), pendent moieties (e.g., polypeptides), intercalators (e.g., acridine, psoralen, etc.), chelators, alkylators, and modified linkages (e.g., alpha anomeric nucleic acids, etc.) The term “nucleic acid molecule” also includes any topological conformation, including single-stranded, double-stranded, partially duplexed, triplexed, hairpinned, circular and padlocked conformations. Also included are synthetic molecules that mimic polynucleotides in their ability to bind to a designated sequence via hydrogen bonding and other chemical interactions. Such molecules are known in the art and include, for example, those in which peptide linkages substitute for phosphate linkages in the backbone of the molecule.

[0131] A “gene” is defined as a nucleic acid molecule that comprises a nucleic acid sequence that encodes a polypeptide and the expression control sequences that surround the nucleic acid sequence that encodes the polypeptide. For instance, a gene may comprise a promoter, one or more enhancers, a nucleic acid sequence that encodes a polypeptide, downstream regulatory sequences and, possibly, other nucleic acid sequences involved in regulation of the expression of an RNA. As is well known in the art, eukaryotic genes usually contain both exons and introns. The term “exoi” refers to a nucleic acid sequence found in genomic DNA that is bioinformatically predicted and/or experimentally confirmed to contribute contiguous sequence to a mature mRNA transcript. The term “intron” refers to a nucleic acid sequence found in genomic DNA that is predicted and/or confirmed to not contribute to a mature mRNA transcript, but rather to be “spliced out” during processing of the transcript.

[0132] A nucleic acid molecule or polypeptide is “derived” from a particular species if the nucleic acid molecule or polypeptide has been isolated from the particular species, or if the nucleic acid molecule or polypeptide is homologous to a nucleic acid molecule or polypeptide isolated from a particular species.

[0133] An “isolated” or “substantially pure” nucleic acid or polynucleotide (e.g., an RNA, DNA or a mixed polymer) is one which is substantially separated from other cellular components that naturally accompany the native polynucleotide in its natural host cell, e.g., ribosomes, polymerases, or genomic sequences with which it is naturally associated. The term embraces a nucleic acid or polynucleotide that (1) has been removed from its naturally occurring environment, (2) is not associated with all or a portion of a polynucleotide in which the “isolated polynucleotide” is found in nature, (3) is operatively linked to a polynucleotide which it is not linked to in nature, (4) does not occur in nature as part of a larger sequence or (5) includes nucleotides or internucleoside bonds that are not found in nature. The term “isolated” or “substantially pure” also can be used in reference to recombinant or cloned DNA isolates, chemically synthesized polynucleotide analogs, or polynucleotide analogs that are biologically synthesized by heterologous systems. The term “isolated nucleic acid molecule” includes nucleic acid molecules that are integrated into a host cell chromosome at a heterologous site, recombinant fusions of a native fragment to a heterologous sequence, recombinant vectors present as episomes or as integrated into a host cell chromosome.

[0134] A “part” of a nucleic acid molecule refers to a nucleic acid molecule that comprises a partial contiguous sequence of at least 10 bases of the reference nucleic acid molecule. Preferably, a part comprises at least 15 to 20 bases of a reference nucleic acid molecule. In theory, a nucleic acid sequence of 17 nucleotides is of sufficient length to occur at random less frequently than once in the three gigabase human genome, and thus to provide a nucleic acid probe that can uniquely identify the reference sequence in a nucleic acid mixture of genomic complexity. A preferred part is one that comprises a nucleic acid sequence that can encode at least 6 contiguous amino acid sequences (fragments of at least 18 nucleotides) because they are useful in directing the expression or synthesis of peptides that are useful in mapping the epitopes of the polypeptide encoded by the reference nucleic acid. See, e.g., Geysen et al., Proc. Natl. Acad. Sci. USA 81:3998-4002 (1984); and U.S. Pat. Nos. 4,708,871 and 5,595,915, the disclosures of which are incorporated herein by reference in their entireties. A part may also comprise at least 25, 30, 35 or 40 nucleotides of a reference nucleic acid molecule, or at least 50, 60, 70, 80, 90, 100, 150, 200, 250, 300, 350, 400 or 500 nucleotides of a reference nucleic acid molecule. A part of a nucleic acid molecule may comprise no other nucleic acid sequences. Alternatively, a part of a nucleic acid may comprise other nucleic acid sequences from other nucleic acid molecules.

[0135] The term “oligonucleotide” refers to a nucleic acid molecule generally comprising a length of 200 bases or fewer. The term often refers to single-stranded deoxyribonucleotides, but it can refer as well to single-or double-stranded ribonucleotides, RNA:DNA hybrids and double-stranded DNAs, among others. Preferably, oligonucleotides are 10 to 60 bases in length and most preferably 12, 13, 14, 15, 16, 17, 18, 19 or 20 bases in length. Other preferred oligonucleotides are 25, 30, 35, 40, 45, 50, 55 or 60 bases in length. Oligonucleotides may be single-stranded, e.g. for use as probes or primers, or may be double-stranded, e.g. for use in the construction of a mutant gene. Oligonucleotides of the invention can be either sense or antisense oligonucleotides. An oligonucleotide can be derivatized or modified as discussed above for nucleic acid molecules.

[0136] Oligonucleotides, such as single-stranded DNA probe oligonucleotides, often are synthesized by chemical methods, such as those implemented on automated oligonucleotide synthesizers. However, oligonucleotides can be made by a variety of other methods, including in vitro recombinant DNA-mediated techniques and by expression of DNAs in cells and organisms. Initially, chemically synthesized DNAs typically are obtained without a 5′ phosphate. The 5′ ends of such oligonucleotides are not substrates for phosphodiester bond formation by ligation reactions that employ DNA ligases typically used to form recombinant DNA molecules. Where ligation of such oligonucleotides is desired, a phosphate can be added by standard techniques, such as those that employ a kinase and ATP. The 3′ end of a chemically synthesized oligonucleotide generally has a free hydroxyl group and, in the presence of a ligase, such as T4 DNA ligase, readily will form a phosphodiester bond with a 5′ phosphate of another polynucleotide, such as another oligonucleotide. As is, well known, this reaction can be prevented selectively, where desired, by removing the 5′ phosphates of the other polynucleotide(s) prior to ligation.

[0137] The term “naturally occurring nucleotide” referred to herein includes naturally occurring deoxyribonucleotides and ribonucleotides. The term “modified nucleotides” referred to herein includes nucleotides with modified or substituted sugar groups and the like. The term “nucleotide linkages” referred to herein includes nucleotides linkages such as phosphorothioate, phosphorodithioate, phosphoroselenoate, phosphorodiselenoate, phosphoroanilothioate, phoshoraniladate, phosphoroamidate, and the like. See e.g., LaPlanche et al. Nucl. Acids Res. 14:9081-9093 (1986); Stein et al. Nucl. Acids Res. 16:3209-3221 (1988); Zon et al. Anti-Cancer Drug Design 6:539-568 (1991); Zon et al., in Eckstein (ed.) Oligonucleotides and Analogues: A Practical Approach, pp. 87-108, Oxford University Press (1991); Uhlmann and Peyman Chemical Reviews 90:543 (1990), and U.S. Pat. No. 5,151,510, the disclosure of which is hereby incorporated by reference in its entirety.

[0138] Unless specified otherwise, the left hand end of a polynucleotide sequence in sense orientation is the 5′ end and the right hand end of the sequence is the 3′ end. In addition, the left hand direction of a polynucleotide sequence in sense orientation is referred to as the 5′ direction, while the right hand direction of the polynucleotide sequence is referred to as the 3′ direction. Further, unless otherwise indicated, each nucleotide sequence is set forth herein as a sequence of deoxyribonucleotides. It is intended, however, that the given sequence be interpreted as would be appropriate to the polynucleotide composition: for example, if the isolated nucleic acid is composed of RNA, the given sequence intends ribonucleotides, with uridine substituted for thymidine.

[0139] The term “allelic variant” refers to one of two or more alternative naturally occurring forms of a gene, wherein each gene possesses a unique nucleotide sequence. In a preferred embodiment, different alleles of a given gene have similar or identical biological properties.

[0140] The term “percent sequence identity” in the context of nucleic acid sequences refers to the residues in two sequences which are the same when aligned for maximum correspondence. The length of sequence identity comparison may be over a stretch of at least about nine nucleotides, usually at least about 20 nucleotides, more usually at least about 24 nucleotides, typically at least about 28 nucleotides, more typically at least about 32 nucleotides, and preferably at least about 36 or more nucleotides. There are a number of different algorithms known in the art which can be used to measure nucleotide sequence identity. For instance, polynucleotide sequences can be compared using FASTA, Gap or Bestfit, which are programs in Wisconsin Package Version 10.0, Genetics Computer Group (GCG), Madison, Wis. FASTA, which includes, e.g., the programs FASTA2 and FASTA3, provides alignments and percent sequence identity of the regions of the best overlap between the query and search sequences (Pearson, Methods Enzymol. 183: 63-98 (1990); Pearson, Methods Mol. Biol. 132: 185-219 (2000); Pearson, Methods Enzymol. 266: 227-258 (1996); Pearson, J. Mol. Biol. 276: 71-84 (1998)). Unless otherwise specified, default parameters for a particular program or algorithm are used. For instance, percent sequence identity between nucleic acid sequences can be determined using FASTA with its default parameters (a word size of 6 and the NOPAM factor for the scoring matrix) or using Gap with its default parameters as provided in GCG Version 6.1.

[0141] A reference to a nucleic acid sequence encompasses its complement unless otherwise specified. Thus, a reference to a nucleic acid molecule having a particular sequence should be understood to encompass its complementary strand, with its complementary sequence. The complementary strand is also useful, e.g., for antisense therapy, double stranded RNA (dsRNA) inhibition (RNAi), combination of triplex and antisense, hybridization probes and PCR primers.

[0142] In the molecular biology art, researchers use the terms “percent sequence identity”, “percent sequence similarity” and “percent sequence homology” interchangeably. In this application, these terms shall have the same meaning with respect to nucleic acid sequences only.

[0143] The term “substantial similarity” or “substantial sequence similarity,” when referring to a nucleic acid or fragment thereof, indicates that, when optimally aligned with appropriate nucleotide insertions or deletions with another nucleic acid (or its complementary strand), there is nucleotide sequence identity in at least about 50%, more preferably 60% of the nucleotide bases, usually at least about 70%, more usually at least about 80%, preferably at least about 90%, more preferably at least about 95-99%, and most preferably at least about 99.5-99.9% of the nucleotide bases, as measured by any well known algorithm of sequence identity, such as FASTA, BLAST or Gap, as discussed above.

[0144] Alternatively, substantial similarity exists between a first and second nucleic acid sequence when the first nucleic acid sequence or fragment thereof hybridizes to an antisense strand of the second nucleic acid, under selective hybridization conditions. Typically, selective hybridization will occur between the first nucleic acid sequence and an antisense strand of the second nucleic acid sequence when there is at least about 55% sequence identity between the first and second nucleic acid sequences—preferably at least about 65%, more preferably at least about 75%, more preferably at least about 90%, even more preferably at least about 95%, further preferably at least about 989%, and most preferably at least about 99%—over a stretch of at least about 14 nucleotides, more preferably at least 17 nucleotides, even more preferably at least 20, 25, 30, 35, 40, 50, 60, 70, 80, 90 or 100 nucleotides, and most preferably at least 200, 300, 400, 500 or 1000 nucleotides.

[0145] Nucleic acid hybridization will be affected by such conditions as salt concentration, temperature, solvents, the base composition of the hybridizing species, length of the complementary regions, and the number of nucleotide base mismatches between the hybridizing nucleic acids, as will be readily appreciated by those skilled in the art. “Stringent hybridization conditions” and “stringent wash conditions” in the context of nucleic acid hybridization experiments depend upon a number of different physical parameters. The most important parameters include temperature of hybridization, base composition of the nucleic acids, salt concentration and length of the nucleic acid. One having ordinary skill in the art knows how to vary these parameters to achieve a particular stringency of hybridization. In general, “stringent hybridization” is performed at about 25° C. below the thermal melting point (Tₘ) for the specific DNA hybrid under a particular set of conditions. “Stringent washing” is performed at temperatures about 5° C. lower than the Tₘ for the specific DNA hybrid under a particular set of conditions. The Tₘ is the temperature at which 50% of the target sequence hybridizes to a perfectly matched probe. See Sambrook (1989), supra, p. 9.51.

[0146] The Tₘ for a particular DNA-DNA hybrid can be estimated by the formula:
Tₘ=81.5° C.+16.6 (log₁₀[Na⁺])+0.41 (fraction G+C)−0.63 (% formamide)−(600/l) where l is the length of the hybrid in base pairs.

[0147] The T for a particular RNA-RNA hybrid can be estimated by the formula:
Tₘ=79.8° C.+18.5 (log₁₀[Na⁺])+0.58 (fraction G+C)+11.8 (fraction G+C)²−0.35 (% formamide)−(820/l).

[0148] The Tₘ for a particular RNA-DNA hybrid can be estimated by the formula:
Tₘ=79.8° C.+18.5(log₁₀[Na⁺])+0.58 (fraction G+C)+11.8 (fraction G+C)²−0.50 (% formamide)−(820/l).

[0149] In general, the Tₘ decreases by 1-1.5° C. for each 1% of mismatch between two nucleic acid sequences. Thus, one having ordinary skill in the art can alter hybridization and/or washing conditions to obtain sequences that have higher or lower degrees of sequence identity to the target nucleic acid. For instance, to obtain hybridizing nucleic acids that contain up to 10% mismatch from the target nucleic acid sequence, 10-15° C. would be subtracted from the calculated Tₘ of a perfectly matched hybrid, and then the hybridization and washing temperatures adjusted accordingly. Probe sequences may also hybridize specifically to duplex DNA under certain conditions to form triplex or other higher order DNA complexes. The preparation of such probes and suitable hybridization conditions are well known in the art.

[0150] An example of stringent hybridization conditions for hybridization of complementary nucleic acid sequences having more than 100 complementary residues on a filter in a Southern or Northern blot or for screening a library is 50% formamide/6×SSC at 42° C. for at least ten hours and preferably overnight (approximately 16 hours). Another example of stringent hybridization conditions is 6×SSC at 68° C. without formamide for at least ten hours and preferably overnight. An example of moderate stringency hybridization conditions is 6×SSC at 55° C. without formamide for at least ten hours and preferably overnight. An example of low stringency hybridization conditions for hybridization of complementary nucleic acid sequences having more than 100 complementary residues on a filter in a Southern or northern blot or for screening a library is 6×SSC at 42° C. for at least ten hours. Hybridization conditions to identify nucleic acid sequences that are similar but not identical can be identified by experimentally changing the hybridization temperature from 68° C. to 42° C. while keeping the salt concentration constant (6×SSC), or keeping the hybridization temperature and salt concentration constant (e.g. 42° C. and 6×SSC) and varying the formamide concentration from 50% to 0%. Hybridization buffers may also include blocking agents to lower background. These agents are well known in the art. Set Sambrook et al. (1989), supra, pages 8.46 and 9.46-9.58. See also Ausubel (1992), supra, Ausubel (1999), supra, and Sambrook (2001), supra.

[0151] Wash conditions also can be altered to change stringency conditions. An example of stringent wash conditions is a 0.2×SSC wash at 65° C. for 15 minutes (see Sambrook (1989), supra, for SSC buffer). Often the high stringency wash is preceded by a low stringency wash to remove excess probe. An exemplary medium stringency wash for duplex DNA of more than 100 base pairs is 1×SSC at 45° C. for 15 minutes. An exemplary low stringency wash for such a duplex is 4×SSC at 40° C. for 15 minutes. In general, signal-to-noise ratio of 2× or higher than that observed for an unrelated probe in the particular hybridization assay indicates detection of a specific hybridization.

[0152] As defined herein, nucleic acids that do not hybridize to each other under stringent conditions are still substantially similar to one another if they encode polypeptides that are substantially identical to each other. This occurs, for example, when a nucleic acid is created synthetically or recombinantly using a high codon degeneracy as permitted by the redundancy of the genetic code.

[0153] Hybridization conditions for nucleic acid molecules that are shorter than 100 nucleotides in length (e.g., for oligonucleotide probes) may be calculated by the formula:

[0154] Tₘ=81.5° C.+16.6(log₁₀[Na⁺])+0.41(fraction G+C)−(600/N), wherein N is change length and the [Na⁺] is 1 M or less. See Sambrook (1989), supra, p. 11.46. For hybridization of probes shorter than 100 nucleotides, hybridization is usually performed under stringent conditions (5-10° C. below the Tm) using high concentrations (0.1-1.0 pmol/ml) of probe. Id. at p. 11.45. Determination of hybridization using mismatched probes, pools of degenerate probes or “guessmers,” as well as hybridization solutions and methods for empirically determining hybridization conditions are well known in the art. See, e.g., Ausubel (1999), supra; Sambrook (1989), supra, pp. 11.45-11.57.

[0155] The term “digestion” or “digestion of DNA” refers to catalytic cleavage of the DNA with a restriction enzyme that acts only at certain sequences in the DNA. The various restriction enzymes referred to herein are commercially available and their reaction conditions, cofactors and other requirements for use are known and routine to the skilled artisan. For analytical purposes, typically, 1 μg of plasmid or DNA fragment is digested with about 2 units of enzyme in about 20 μl of reaction buffer. For the purpose of isolating DNA fragments for plasmid construction, typically 5 to 50 μg of DNA are digested with 20 to 250 units of enzyme in proportionately larger volumes. Appropriate buffers and substrate amounts for particular restriction enzymes are described in standard laboratory manuals, such as those referenced below, and are specified by commercial suppliers. Incubation times of about 1 hour at 37° C. are ordinarily used, but conditions may vary in accordance with standard procedure's, the supptier's instructions and the particulars of the reaction. After digestion, reactions may be analyzed, and fragments may be purified by electrophoresis through an agarose or polyacrylamide gel, using well known methods that are routine for those skilled in the art.

[0156] The term “ligation” refers to the process of forming phosphodiester bonds between two or more polynucleotides, which most often are double-stranded DNAs. Techniques for ligation are well known to the art and protocols for ligation are described in standard laboratory manuals and references, such as, e.g., Sambrook (1989), supra.

[0157] Genome-derived “single exon probes,” are probes that comprise at least part of an exon (“reference exon”) and can hybridize detectably under high stringency conditions to transcript-derived nucleic acids that include the reference exon but do not hybridize detectably under high stringency conditions to nucleic acids that lack the reference exon. Single exon probes typically further comprise, contiguous to a first end of the exon portion, a first intronic and/or intergenic sequence that is identically contiguous to the exon in the genome, and may contain a second intronic and/or intergenic sequence that is identically contiguous to the exon in the genome. The minimum length of genome-derived single exon probes is defined by the requirement that the exonic portion be of sufficient length to hybridize under high stringency conditions to transcript-derived nucleic acids, as discussed above. The maximum length of genome-derived single exon probes is defined by the requirement that the probes contain portions of no more than one exon. The single exon probes may contain priming sequences not found in contiguity with the rest of the probe sequence in the genome, which priming sequences are useful for PCR and other amplification-based technologies. In another aspect, the invention is directed to single exon probes based on the CaSNAs disclosed herein.

[0158] In one embodiment, the term “microarray” refers to a “nucleic acid microarray” having a substrate-bound plurality of nucleic acids, hybridization to each of the plurality of bound nucleic acids being separately detectable. The substrate can be solid or porous, planar or non-planar, unitary or distributed. Nucleic acid microarrays include all the devices so called in Schena (ed.), DNA Microarrays: A Practical Approach (Practical Approach Series), Oxford University Press (1999); Nature Genet. 21(1)(suppl.): 1-60 (1999); Schena (ed.), Microarray Biochip: Tools and Technology, Eaton Publishing Company/BioTechniques Books Division (2000). Additionally, these nucleic acid microarrays include substrate-bound plurality of nucleic acids in which the plurality of nucleic acids are disposed on a plurality of beads, rather than on a unitary planar substrate; as is described, inter alia, in Brenner et al., Proc. Natl. Acad. Sci. USA 97(4):1665-1670 (2000). Examples of nucleic acid microarrays may be found in U.S. Pat. Nos. 6,391,623, 6,383,754, 6,383,749, 6,380,377, 6,379,897, 6,376,191, 6,372,431, 6,351,712 6,344,316, 6,316,193, 6,312,906, 6,309,828, 6,309,824, 6,306,643, 6,300,063, 6,287,850, 6,284,497, 6,284,465, 6,280,954, 6,262,216, 6,251,601, 6,245,518, 6,263,287, 6,251,601, 6,238,866, 6,228,575, 6,214,587, 6,203,989, 6,171,797, 6,103,474, 6,083,726, 6,054,274, 6,040,138, 6,083,726, 6,004,755, 6,001,309, 5,958,342, 5,952,180, 5,936,731, 5,843,655, 5,814,454, 5,837,196, 5,436,327, 5,412,087, 5,405,783, the disclosures of which are incorporated herein by reference in their entireties.

[0159] In an alternative embodiment, a “microarray” may also refer to a “peptide microarray” or “protein microarray” having a substrate-bound collection of plurality of polypeptides, the binding to each of the plurality of bound polypeptides being separately detectable. Alternatively, the peptide microarray may have a plurality of binders, including but not limited to monoclonal antibodies, polyclonal antibodies, phage display binders, yeast 2 hybrid binders, aptamers, which can specifically detect the binding of the polypeptides of this invention. The array may be based on autoantibody detection to the polypeptides of this invention, see Robinson et al., Nature Medicine 8(3):295-301 (2002). Examples of peptide arrays may be found in WO 02/31463, WO 02/25288, WO 01/94946, WO 01/88162, WO 01/68671, WO 01/57259, WO 00/61806, WO 00/54046, WO 00/47774, WO 99/40434, WO 99/39210, WO 97/42507 and U.S. Pat. Nos. 6,268,210, 5,766,960, 5,143,854, the disclosures of which are incorporated herein by reference in their entireties.

[0160] In addition, determination of the levels of the CaSNA or CaSP may be made in a multiplex manner using techniques described in WO 02/29109, WO 02/24959, WO 01/83502, WO01/73113, WO 01/59432, WO 01/57269, WO 99/67641, the disclosures of which are incorporated herein by reference in their entireties.

[0161] The term “mutant”, “mutated”, or “mutation” when applied to nucleic acid sequences means that nucleotides in a nucleic acid sequence may be inserted, deleted or changed compared to a reference nucleic acid sequence. A single alteration may be made at a locus (a point mutation) or multiple nucleotides may be inserted, deleted or changed at a single locus. In addition, one or more alterations may be made at any number of loci within a nucleic acid sequence. In a preferred embodiment of the present invention, the nucleic acid sequence is the wild type nucleic acid sequence encoding a CaSP or is a CaSNA. The nucleic acid sequence may be mutated by any method known in the art including those mutagenesis techniques described infra.

[0162] The term “error-prone PCR” refers to a process for performing PCR under conditions where the copying fidelity of the DNA polymerase is low, such that a high rate of point mutations is obtained along the entire length of the PCR product. See, e.g., Leung et al., Technique 1: 11-15 (1989) and Caldwell et al., PCR Methods Applic. 2: 28-33 (1992).

[0163] The term “oligonucleotide-directed mutagenesis” refers to a process which enables the generation of site-specific mutations in any cloned DNA segment of interest. See, e.g., Reidhaar-Olson et al., Science 241: 53-57 (1988).

[0164] The term “assembly PCR” refers to a process which involves the assembly of a PCR product from a mixture of small DNA fragments. A large number of different PCR reactions occur in parallel in the same vial, with the products of one reaction priming the products of another reaction.

[0165] The term “sexual PCR mutagenesis” or “DNA shuffling” refers to a method of error-prone PCR coupled with forced homologous recombination between DNA molecules of different but highly related DNA sequence in vitro, caused by random fragmentation of the DNA molecule based on sequence similarity, followed by fixation of the crossover by primer extension in an error-prone PCR reaction. See, e.g., Stemmer, Proc. Natl. Acad. Sci. U.S.A. 91: 10747-10751(1994). DNA shuffling can be carried out between several related genes (“Family shuffling”).

[0166] The term “in vivo mutagenesis” refers to a process of generating random mutations in any cloned DNA of interest which involves the propagation of the DNA in a strain of bacteria such as E. coli that carries mutations in one or more of the DNA repair pathways. These “mutator” strains have a higher random mutation rate than that of a wild-type parent. Propagating the DNA in a mutator strain will eventually generate random mutations within the DNA.

[0167] The term “cassette mutagenesis” refers to any process for replacing a small region of a double-stranded-DNA molecule with a synthetic oligonucleotide “cassette” that differs from the native sequence. The oligonucleotide often contains completely and/or partially randomized native sequence.

[0168] The term “recursive ensemble mutagenesis” refers to an algorithm for protein engineering (protein mutagenesis) developed to produce diverse populations of phenotypically related mutants whose members differ in amino acid sequence. This method uses a feedback mechanism to control successive rounds of combinatorial cassette mutagenesis. See, e.g., Arkin et al., Proc. Natl. Acad. Sci. U.S.A. 89: 7811-7815 (1992).

[0169] The term “exponential ensemble mutagenesis” refers to a process for generating combinatorial libraries with a high percentage of unique and functional mutants, wherein small groups of residues are randomized in parallel to identify, at each altered position, amino acids which lead to functional proteins. See, e.g., Delegrave et al., Biotechnology Research 11: 1548-1552 (1993); Arnold, Current Opinion in Biotechnology 4: 450-455 (1993).

[0170] “Operatively linked” expression control sequences refers to a linkage in which the expression control sequence is either contiguous with the gene of interest to control the gene of interest, or acts in trans or at a distance to control the gene of interest.

[0171] The term “expression control sequence” as used herein refers to polynucleotide sequences which are necessary to affect the expression of coding sequences to which they are operatively linked. Expression control sequences are sequences which control the transcription, post-transcriptional events and translation of nucleic acid sequences. Expression control sequences include appropriate transcription initiation, termination, promoter and enhancer sequences; efficient RNA processing signals such as splicing and polyadenylation signals; sequences that stabilize cytoplasmic mRNA; sequences that enhance translation efficiency (e.g., ribosome binding sites); sequences that enhance protein stability; and when desired, sequences that enhance protein secretion. The nature of such control sequences differs depending upon the host organism; in prokaryotes, such control sequences generally include promoter, ribosomal binding site, and transcription termination sequence. The term “control sequences” is intended to include, at a minimum, all components whose presence is essential for expression, and can also include additional components whose presence is advantageous, for example, leader sequences and fusion partner sequences.

[0172] The term “vector,” as used herein, is intended to refer to a nucleic acid molecule capable of transporting another nucleic acid to'which it has been linked. One type of vector is a “plasmid”, which refers to a circular double-stranded DNA loop into which additional DNA segments may be ligated. Other vectors include cosmids, bacterial artificial chromosomes (BAC) and yeast artificial chromosomes (YAC). Another type of vector is a viral vector, wherein additional DNA segments may be ligated into the viral genome. Viral vectors that infect bacterial cells are referred to as bacteriophages. Certain vectors are capable of autonomous replication in a host cell into which they are introduced (e.g., bacterial vectors having a bacterial origin of replication). Other vectors can be integrated into the genome of a host cell upon introduction into the host cell, and thereby are replicated along with the host genome. Moreover, certain vectors are capable of directing the expression of genes to which they are operatively linked. Such vectors are referred to herein as “recombinant expression vectors” (or simply, “expression vectors”). In general, expression vectors of utility in recombinant DNA techniques are often in the form of plasmids. In the present specification, “plasmid” and “vector” may be used interchangeably as the plasmid is the most commonly used form of vector. However, the invention is intended to include other forms of expression vectors that serve equivalent functions.

[0173] The term “recombinant host cell” (or simply “host cell”), as used herein, is intended to refer to a cell into which a recombinant expression vector has been introduced. It should be understood that such terms are intended to refer not only to the particular subject cell but to the progeny of such a cell. Because certain modifications may occur in succeeding generations due to either mutation or environmental influences, such progeny may not, in fact, be identical to the parent cell, but are still included within the scope of the term “host cell” as used herein.

[0174] As used herein, the phrase “open reading frame” and the equivalent acronym “ORF” refers to that portion of a transcript-derived nucleic acid that can be translated in its entirety into a sequence of contiguous amino acids. As so defined, an ORF has length, measured in nucleotides, exactly divisible by 3. As so defined, an ORF need not encode the entirety of a natural protein.

[0175] As used herein, the phrase “ORF-encoded peptide” refers to the predicted or actual translation of an ORF.

[0176] As used herein the phrase “degenerate variant” of a reference nucleic acid sequence is meant to be inclusive of all nucleic acid sequences that can be directly translated, using the standard genetic code, to provide an amino acid sequence identical to that translated from the reference nucleic acid sequence.

[0177] The term “polyoeptide” encompasses both naturally occurring and non-naturally occurring proteins and polypeptides, as well as polypeptide fragments and polypeptide mutants, derivatives and analogs thereof. A polypeptide may be monomeric or polymeric. Further, a polypeptide may comprise a number of different modules within a single polypeptide each of which has one or more distinct activities. A preferred polypeptide in accordance with the invention comprises a CaSP encoded by a nucleic acid molecule of the instant invention, or a fragment, mutant, analog and derivative thereof.

[0178] The term “isolated protein” or “isolated polypeptide” is a protein or polypeptide that by virtue of its origin or source of derivation (1) is not associated with naturally associated components that accompany it in its native state, (2) is free of other proteins from the same species (3) is expressed by a cell from a different species, or (4) does not occur in nature. Thus, a polypeptide that is chemically synthesized or synthesized in a cellular system different from the cell from which it naturally originates will be “isolated” from its naturally associated components. A polypeptide or protein may also be rendered substantially free of naturally associated components by isolation, using protein purification techniques well known in the art.

[0179] A protein or polypeptide is “substantially pure,” “substantially homogeneous” or “substantially purified” when at least about 60% to 75% of a sample exhibits a single species of polypeptide. The polypeptide or protein may be monomeric or multimeric. A substantially pure polypeptide or protein will typically comprise about 50%, 60%, 70%, 80% or 90% W/W of a protein sample, more usually about 95%, and preferably will be over 99% pure. Protein purity or homogeneity may be determined by a number of means well known in the art, such as polyacrylamide gel electrophoresis of a protein sample, followed by visualizing a single polypeptide band upon staining the gel with a stain well known in the art. For certain purposes, higher resolution may be provided by using HPLC or other means well known in the art for purification.

[0180] The term “fragment” when used herein with respect to polypeptides of the present invention refers to a polypeptide that has an amino-terminal and/or carboxy-terminal deletion compared to a full-length CaSP. In a preferred embodiment, the fragment is a contiguous sequence in which the amino acid sequence of the fragment is identical to the corresponding positions in the naturally occurring polypeptide. Fragments typically are at least 5, 6, 7, 8, 9 or 10 amino acids long, preferably at least 12, 14, 16 or 18 amino acids long, more preferably at least 20 amino acids long, more preferably at least 25, 30, 35, 40 or 45, amino acids, even more preferably at least 50 or 60 amino acids long, and even more preferably at least 70 amino acids long.

[0181] A “derivative” when used herein with respect to polypeptides of the present invention refers to a polypeptide which is substantially similar in primary structural sequence to a CaSP but which include, e.g., in vivo or in vitro chemical and biochemical modifications that are not found in the CaSP. Such modifications include, for example, acetylation, acylation, ADP-ribosylation, amidation, covalent attachment of flavin, covalent attachment of a heme moiety, covalent attachment of a nucleotide or nucleotide derivative, covalent attachment of a lipid or lipid derivative, covalent attachment of phosphotidylinositol, cross-linking, cyclization, disulfide bond formation, demethylation, formation of covalent cross-links, formation of cystine, formation of pyroglutamate, formylation, gamma-carboxylation, glycosylation, GPI anchor formation, hydroxylation, iodination, methylation, myristoylation, oxidation, proteolytic processing, phosphorylation, prenylation, racemization, selenoylation, sulfation, transfer-RNA mediated addition of amino acids to proteins such as arginylation, and ubiquitination. Other modification include, e.g., labeling with radionuclides, and various enzymatic modifications, as will be readily appreciated by those skilled in the art. A variety of methods for labeling polypeptides and of substituents or labels useful for such purposes are well known in the art, and include radioactive isotopes such as ¹²⁵I, ³²P, ³⁵S, ¹⁴C and ³H, ligands which bind to labeled antiligands (e.g., antibodies), fluorophores, chemiluminescent agents, enzymes, and antiligands which can serve as specific binding pair members for a labeled ligand. The choice of label depends on the sensitivity required, ease of conjugation with the primer, stability requirements, and available instrumentation. Methods for labeling polypeptides are well known in the art. See Ausubel (1992), supra; Ausubel (1999), supra.

[0182] The term “fusion protein” refers to polypeptides of the present invention coupled to a heterologous amino acid sequences. Fusion proteins are useful because they can be constructed to contain two or more desired functional elements from two or more different proteins. A fusion protein comprises at least 10 contiguous amino acids from a polypeptide of interest, more preferably at least 20 or 30 amino acids, even more preferably at least 40, 50 or 60 amino acids, yet more preferably at least 75, 100 or 125 amino acids. Fusion proteins can be produced recombinantly by constructing a nucleic acid sequence that encodes the polypeptide or a fragment thereof in frame with a nucleic acid sequence encoding a different protein or peptide and then expressing the fusion protein. Alternatively, a fusion protein can be produced chemically by crosslinking the polypeptide or a fragment thereof to another protein.

[0183] The term “analog” refers to both polypeptide analogs and non-peptide analogs. The term “polypeptide analog” as used herein refers to a polypeptide that is comprised of a segment of at least 25 amino acids that has substantial identity to a portion of an amino acid sequence but which contains non-natural amino acids or non-natural inter-residue bonds. In a preferred embodiment, the analog has the same or similar biological activity as the native polypeptide. Typically, polypeptide analogs comprise a conservative amino acid substitution (or insertion or deletion) with respect to the naturally occurring sequence. Analogs typically are at least 20 amino acids long, preferably at least 50 amino acids long or longer, and can often be as long as a full-length naturally occurring polypeptide.

[0184] The term “non-peptide analog” refers to a compound with properties that are analogous to those of a reference polypeptide. A non-peptide compound may also be termed a “peptide mimetic” or a “peptidomimetic.” Such compounds are often developed with the aid of computerized molecular modeling. Peptide mimetics that are structurally similar to useful peptides may be used to produce an equivalent effect. Generally, peptidomimetics are structurally similar to a paradigm polypeptide (i.e., a polypeptide that has a desired biochemical property or pharmacological activity), but have one or more peptide linkages optionally replaced by a linkage selected from the group consisting of: —CH₂NH—, —CH₂S—, —CH₂—CH₂—, —CH═CH—(cis and trans), —COCH₂—, —CH(OH)CH₂—, and —CH₂SO—, by methods well known in the art. Systematic substitution of one or more amino acids of a consensus sequence with a D-amino acid of the same type (e.g., D-lysine in place of L-lysine) may also be used to generate more stable peptides. In addition, constrained peptides comprising a consensus sequence or a substantially identical consensus sequence variation may be generated by methods known in the art (Rizo et al., Ann. Rev. Biochem. 61:387-418 (1992)). For example, one may add internal cysteine residues capable of forming intramolecular disulfide bridges which cyclize the peptide.

[0185] The term “mutant” or “mutein” when referring to a polypeptide of the present invention relates to an amino acid sequence containing substitutions, insertions or deletions of one or more amino acids compared to the amino acid sequence of a CaSP. A mutein may have one or more amino acid point substitutions, in which a single amino acid at a position has been changed to another amino acid, one or more insertions and/or deletions, in which one or more amino acids are inserted or deleted, respectively, in the sequence of the naturally occurring protein, and/or truncations of the amino acid sequence at either or both the amino or carboxy termini. Further, a mutein may have the same or different biological activity as the naturally occurring protein. For instance, a mutein may have an increased or decreased biological activity. A mutein has at least 50% sequence similarity to the wild type protein, preferred is 60% sequence similarity, more preferred is 70% sequence similarity. Even more preferred are muteins having 80%, 85% or 90% sequence similarity to a CaSP. In an even more preferred embodiment, a mutein exhibits 95% sequence identity, even more preferably 97%, even more preferably 98% and even more preferably 99%. Sequence similarity may be measured by any common sequence analysis algorithm, such as GAP or BESTFIT or other variation Smith-Waterman alignment. See, T. F. Smith and M. S. Waterman, J. Mol. Biol. 147:195-197 (1981) and W. R. Pearson, Genomics 11:635-650 (1991).

[0186] Preferred amino acid substitutions are those which: (1) reduce susceptibility to proteolysis, (2) reduce susceptibility to oxidation, (3) alter binding affinity for forming protein complexes, (4) alter binding affinity or enzymatic activity, and (5) confer or modify other physicochemical or functional properties of such analogs. For example, single or multiple amino acid substitutions (preferably conservative amino acid substitutions) may be made in the naturally occurring sequence (preferably in the portion of the polypeptide outside the domain(s) forming intermolecular contacts. In a preferred embodiment, the amino acid substitutions are moderately conservative substitutions or conservative substitutions. In a more preferred embodiment, the amino acid substitutions are conservative substitutions. A conservative amino acid substitution should not substantially change the structural characteristics of the parent sequence (e.g. a replacement amino acid should not tend to disrupt a helix that occurs in the parent sequence, or disrupt other types of secondary structure that characterizes the parent sequence). Examples of art-recognized polypeptide secondary and tertiary structures are described in Creighton (ed.), Proteins, Structures and Molecular Principles, W.H. Freeman ad Company (1984); Branden et al. (ed.), Introduction to Protein Structure, Garland Publishing (1991); Thornton et al., Nature 354:105-106 (1991).

[0187] As used herein, the twenty conventional amino acids and their abbreviations follow conventional usage. See Golub et al. (eds.), Immunology—A Synthesis 2^{nd} Ed., Sinauer Associates. (1991). Stereoisomers (e.g., D-amino acids) of the twenty conventional amino acids, unnatural amino acids such as α-, α-disubstituted amino acids, N-alkyl amino acids, and other unconventional amino acids may also be suitable components for polypeptides of the present invention. Examples of unconventional amino acids include: 4-hydroxyproline, γ-carboxyglutamate, ε-N,N,N-trimethyllysine, ε-N-acetyllysine, O-phosphoserine, N-acetylserine, N-formylmethionine, 3-methylhistidine, 5-hydroxylysine, s-N-methylarginine, and other similar amino acids and imino acids (e.g., 4-hydroxyproline). In the polypeptide notation used herein, the lefthand direction is the amino terminal direction and the right hand direction is the carboxy-terminal direction, in accordance with standard usage and convention.

[0188] By “homology” or “homologous” when referring to a polypeptide of the present invention it is meant polypeptides from different organisms with a similar sequence to the encoded amino acid sequence of a CaSP and a similar biological activity or function. Although two polypeptides are said to be “homologous,” this does not imply that there is necessarily an evolutionary relationship between the polypeptides. Instead, the term “homologous” is defined to mean that the two polypeptides have similar amino acid sequences and similar biological activities or functions. In a preferred embodiment, a homologous polypeptide is one that exhibits 50% sequence similarity to CaSP, preferred is 60% sequence similarity, more preferred is 70% sequence similarity. Even more preferred are homologous polypeptides that exhibit 80%, 85% or 90% sequence similarity to a CaSP. In a yet more preferred embodiment, a homologous polypeptide exhibits 95%, 97%, 98% or 99% sequence similarity.

[0189] When “sequence similarity” is used in reference to polypeptides, it is recognized that residue positions that are not identical often differ by conservative amino acid substitutions. In a preferred embodiment, a polypeptide that has “sequence similarity” comprises conservative or moderately conservative amino acid substitutions. A “conservative amino acid substitution” is one in which an amino acid residue is substituted by another amino acid residue having a side chain (R group) with similar chemical properties (e.g. charge or hydrophobicity). In general, a conservative amino acid substitution will not substantially change the functional properties of a protein. In cases where two or more amino acid sequences differ from each other by conservative substitutions, the percent sequence identity or degree of similarity may be adjusted upwards to correct for the conservative nature of the substitution. Means for making this adjustment are well known to those of skill in the art. See, e.g., Pearson, Methods Mol. Biol. 24: 307-31 (1994).

[0190] For instance, the following six groups each contain amino acids that are conservative substitutions for one another:

[0191] 1) Serine (S), Threonine (T);

[0192] 2) Aspartic Acid (D), Glutamic Acid (E);

[0193] 3) Asparagine (N), Glutamine (Q);

[0194] 4) Arginine (R), Lysine (K);

[0195] 5) Isoleucine (I), Leucine (L), Methionine (M), Alanine (A), Valine (V), and

[0196] 6) Phenylalanine (F), Tyrosine (Y), Tryptophan (W).

[0197] Alternatively, a conservative replacement is any change having a positive value in the PAM250 log-likelihood matrix disclosed in Gonnet et al., Science 256: 1443-45 (1992). A “moderately conservative” replacement is any change having a nonnegative value in the PAM250 log-likelihood matrix.

[0198] Sequence similarity for polypeptides, which is also referred to as sequence identity, is typically measured using sequence analysis software. Protein analysis software matches similar sequences using measures of similarity assigned to various substitutions, deletions and other modifications, including conservative amino acid substitutions. For instance, GCG contains programs such as “Gap” and “Bestfit” which can be used with default parameters to determine sequence homology or sequence identity between closely related polypeptides, such as homologous polypeptides from different species of organisms or between a wild type protein and a mutein thereof. See, e.g., GCG Version 6.1. Other programs include FASTA, discussed supra.

[0199] A preferred algorithm when comparing a sequence of the invention to a database containing a large number of sequences from different organisms is the computer program BLAST, especially blastp or tblastn. See, e.g., Altschul et al., J. Mol. Biol. 215: 403-410 (1990); Altschul et al., Nucleic Acids Res. 25:3389-402 (1997). Preferred parameters for blastp are:

[0200] Expectation value: 10 (default)

[0201] Filter: seg (default)

[0202] Cost to open a gap: 11 (default)

[0203] Cost to extend a gap: 1 (default

[0204] Max. alignments: 100 (default)

[0205] Word size: 11 (default)

[0206] No. of descriptions: 100 (default)

[0207] Penalty Matrix: BLOSUM62

[0208] The length of polypeptide sequences compared for homology will generally be at least about 16 amino acid residues, usually at least about 20 residues, more usually at least about 24 residues, typically at least about 28 residues, and preferably more than about 35 residues. When searching a database containing sequences from a large number of different organisms, it is preferable to compare amino acid sequences.

[0209] Algorithms other than blastp for database searching using amino acid sequences are known in the art. For instance, polypeptide sequences can be compared using FASTA, a program in GCG Version 6.1. FASTA (e.g., FASTA2 and FASTA3) provides alignments and percent sequence identity of the regions of the best overlap between the query and search sequences (Pearson (1990), supra; Pearson (2000), supra. For example, percent sequence identity between amino acid sequences can be determined using FASTA with its default or recommended parameters (a word size of 2 and the PAM250 scoring matrix), as provided in GCG Version 6.1.

[0210] An “antibody” refers to an intact immunoglobulin, or to an antigen-binding portion thereof that competes with the intact antibody for specific binding to a molecular species, e.g., a polypeptide of the instant invention. Antigen-binding portions may be produced by recombinant DNA techniques or by enzymatic or chemical cleavage of intact antibodies. Antigen-binding portions include, inter alia, Fab, Fab′, F(ab′)₂, Fv, dAb, and complementarity determining region (CDR) fragments, single-chain antibodies (scFv), chimeric antibodies, diabodies and polypeptides that contain at least a portion of an immunoglobulin that is sufficient to confer specific antigen binding to the polypeptide. A Fab fragment is a monovalent fragment consisting of the VL, VH, CL and CH1 domains; a F(ab′)₂ fragment is a bivalent fragment comprising two Fab fragments linked by a disulfide bridge at the hinge region; a: Fd fragment consists of the VH and CH1 domains; a Fv fragment consists of the VL and VH domains of a single arm of an antibody; and a dAb fragment consists of a VH domain. See, e.g., Ward et al., Nature 341: 544-546 (1989).

[0211] By “bind specifically” and “specific binding” as used herein it is meant the ability of the antibody to bind to a first molecular species in preference to binding to other molecular species with which the antibody and first molecular species are admixed. An antibody is said specifically to “recognize” a first molecular species when it can bind specifically to that first molecular species.

[0212] A single-chain antibody (scFv) is an antibody in which VL and VH regions are paired to form a monovalent molecule via a synthetic linker that enables them to be made as a single protein chain. See, e.g., Bird et al., Science 242: 423-426 (1988); Huston et al., Proc. Natl. Acad. Sci. USA 85: 5879-5883 (1988). Diabodies are bivalent, bispecific antibodies in which VH and VL domains are expressed on a single polypeptide chain, but using a linker that is too short to allow for pairing between the two domains on the same chain, thereby forcing the domains to pair with complementary domains of another chain and creating two antigen binding sites. See e.g., Holliger et al., Proc. Natl. Acad. Sci. USA 90: 6444-6448 (1993); Poljak et al., Structure 2: 1121-1123 (1994). One or more CDRs may be incorporated into a molecule either covalently or noncovalently to make it an immunoadhesin. An immunoadhesin may incorporate the CDR(s) as part of a larger polypeptide chain, may covalently link the CDR(s) to another polypeptide chain, or may incorporate the CDR(s) noncovalently. The CDRs permit the immunoadhesin to specifically bind to a particular antigen of interest. A chimeric antibody is an antibody that contains one or more regions from one antibody and one or more regions from one or more other antibodies.

[0213] An antibody may have one or more binding sites. If there is more than one binding site, the binding sites may be identical to one another or may be different. For instance, a naturally occurring immunoglobulin has two identical binding sites, a single-chain antibody or Fab fragment has one binding site, while a “bispecific” or “bifunctional” antibody has two different binding sites.

[0214] An “isolated antibody” is an antibody that (1) is not associated with naturally-associated components, including other naturally-associated antibodies, that accompany it in its native state, (2) is free of other proteins from the same species, (3) is expressed by a cell from a different species, or (4) does not occur in nature. It is known that purified proteins, including purified antibodies may be stabilized with non-naturally-associated components. The non-naturally-associated component may be a protein, such as albumin (e.g., BSA) or a chemical such as polyethylene glycol (PEG).

[0215] A “neutralizing antibody” or “an inhibitory antibody” is an antibody that inhibits the activity of a polypeptide or blocks the binding of a polypeptide to a ligand that normally binds to it. An “activating antibody” is an antibody that increases the activity of a polypeptide.

[0216] The term “epitope” includes any protein determinant capable of specific binding to an immunoglobulin or T-cell receptor. Epitopic determinants usually consist of chemically active surface groupings of molecules such as amino acids or sugar side chains and usually have specific three-dimensional structural characteristics, as well as specific charge characteristics. An antibody is said to specifically bind an antigen when the dissociation constant is less than 1 μM, preferably less than 100 nM and most preferably less than 10 nM.

[0217] The term “patient” includes human and veterinary subjects.

[0218] Throughout this specification and claims, the word “comprise,” or variations such as “comprises” or “comprising,” will be understood to imply the inclusion of a stated integer or group of integers but not the exclusion of any other integer or group of integers.

[0219] The term “cancer specific” refers to a nucleic acid molecule or polypeptide that is expressed predominantly in the breast, colon, lung, ovarian or prostate cancer as compared to other tissues in the body. In a preferred embodiment, a “cancer specific” nucleic acid molecule or polypeptide is detected at a level that is 1.5-fold higher than any other tissue in the body. In a more preferred embodiment, the “cancer specific” nucleic acid molecule or polypeptide is detected at a level that is 2-fold higher than any other tissue in the body, more preferably 5-fold higher, still more preferably at least 10-fold, 15-fold, 20-fold, 25-fold, 50-fold or 100-fold higher than any other tissue in the body. Nucleic acid molecule levels may be measured by nucleic acid hybridization, such as Northern blot hybridization, or quantitative PCR. Polypeptide levels may be measured by any method known to accurately quantitate protein levels, such as Western blot analysis.

Nucleic Acid Molecules, Regulatory Sequences, Vectors, Host Cells and Recombinant Methods of Making Polypeptides

[0220] Nucleic Acid Molecules

[0221] One aspect of the invention provides isolated nucleic acid molecules that are specific to cancer or to caner cells or tissue or that are derived from such nucleic acid molecules. These isolated cancer specific nucleic acids (CaSNAs) may comprise cDNA genomic DNA, RNA, or a combination thereof, a fragment of one of these nucleic acids, or may be a non-naturally occurring nucleic acid molecule. A CaSNA may be derived from an animal. In a preferred embodiment, the CaSNA is derived from a human or other mammal. In a more preferred embodiment, the CaSNA is derived from a human or other primate. In an even more preferred embodiment, the CaSNA is derived from a human.

[0222] In a preferred embodiment, the nucleic acid molecule encodes a polypeptide that is specific to cancer, a cancer-specific polypeptide (CaSP). In a more preferred embodiment, the nucleic acid molecule encodes a polypeptide that comprises an amino acid sequence of SEQ ID NO: 142-361. In another highly preferred embodiment, the nucleic acid molecule comprises a nucleic acid sequence of SEQ ID NO: 1-141. Nucleotide sequences of the instantly-described nucleic acid molecules were determined by assembling several DNA molecules from either public or proprietary databases. Some of the underlying DNA sequences are the result, directly or indirectly, of at least one enzymatic polymerization reaction (e.g., reverse transcription and/or polymerase chain reaction) using an automated sequencer (such as the MegaBACE™ 1000, Amersham Biosciences, Sunnyvale, Calif., USA).

[0223] Nucleic acid molecules of the present invention may also comprise sequences that selectively hybridizes to a nucleic acid molecule encoding a CaSNA or a complement or antisense thereof. The hybridizing nucleic acid molecule may or may not encode a polypeptide or may or may not encode a CaSP. However, in a preferred embodiment, the hybridizing nucleic acid molecule encodes a CaSP. In a more preferred embodiment, the invention provides a nucleic acid molecule that selectively hybridizes to a nucleic acid molecule or the antisense sequence of a nucleic acid molecule that encodes a polypeptide comprising an amino acid sequence of SEQ ID NO: 142-361. In an even more preferred embodiment, the invention provides a nucleic acid molecule that selectively hybridizes to a nucleic acid molecule comprising the nucleic acid sequence of SEQ ID NO: 1-141 or the antisense sequence thereof. Preferably, the nucleic acid molecule selectively hybridizes to a nucleic acid molecule or the antisense sequence of a nucleic acid molecule encoding a CaSP under low stringency conditions. More preferably, the nucleic acid molecule selectively hybridizes to a nucleic acid molecule or the antisense sequence of a nucleic acid molecule encoding a CaSP under moderate stringency conditions. Most preferably, the nucleic acid molecule selectively hybridizes to a nucleic acid molecule or the antisense sequence of a nucleic acid molecule encoding a CaSP under high stringency conditions. In a preferred embodiment, the nucleic acid molecule hybridizes under low, moderate or high stringency conditions to a nucleic acid molecule or the antisense sequence of a nucleic acid molecule encoding a polypeptide comprising an amino acid sequence of SEQ ID NO: 142-361. In a more preferred embodiment, the nucleic acid molecule hybridizes under low, moderate or high stringency conditions to a nucleic acid molecule or the antisense sequence of a nucleic acid molecule comprising a nucleic acid sequence selected from SEQ ID NO: 1-141.

[0224] Nucleic acid molecules of the present invention may also comprise nucleic acid sequences that exhibit substantial sequence similarity to a nucleic acid encoding a CaSP or a complement of the encoding nucleic acid molecule. In this embodiment, it is preferred that the nucleic acid molecule exhibit substantial sequence similarity to a nucleic acid molecule encoding human CaSP. More preferred is a nucleic acid molecule exhibiting substantial sequence similarity to a nucleic acid molecule encoding a polypeptide having an amino acid sequence of SEQ ID NO: 142-361. By substantial sequence similarity it is meant a nucleic acid molecule having at least 60% sequence identity with a nucleic acid molecule encoding a CaSP, such as a polypeptide having an amino acid sequence of SEQ ID NO: 142-361, more preferably at least 70%, even more preferably at least 80% and even more preferably at least 85%. In a more preferred embodiment, the similar nucleic acid molecule is one that has at least 90% sequence identity with a nucleic acid molecule encoding a CaSP, more preferably at least 95%, more preferably at least 97%, even more preferably at least 98%, and still more preferably at least 99%. Most preferred in this embodiment is a nucleic acid molecule that has at least 99.5%, 99.6%, 99.7%, 99.8% or 99.9% sequence identity with a nucleic acid molecule encoding a CaSP.

[0225] The nucleic acid molecules of the present invention are also inclusive of those exhibiting substantial sequence similarity to a CaSNA or its complement. In this embodiment, it is preferred that the nucleic acid molecule exhibit substantial sequence similarity to a nucleic acid molecule having a nucleic acid sequence of SEQ ID NO: 1-141. By substantial sequence similarity it is meant a nucleic acid molecule that has at least 60% sequence identity with a CaSNA, such as one having a nucleic acid sequence of SEQ ID NO: 1-141, more preferably at least 70%, even more preferably at least 80% and even more preferably at least 85%. More preferred is a nucleic acid molecule that has at least 90% sequence identity with a CaSNA, more preferably at least 95%, more preferably at least 97%, even more preferably at least 98%, and still more preferably at least 99%. Most preferred is a nucleic acid molecule that has at least 99.5%, 99.6%, 99.7%, 99.8% or 99.9% sequence identity with a CaSNA.

[0226] Nucleic acid molecules that exhibit substantial sequence similarity are inclusive of sequences that exhibit sequence identity over their entire length to a CaSNA or to a nucleic acid molecule encoding a CaSP, as well as sequences that are similar over only a part of its length. In this case, the part is at least 50 nucleotides of the CaSNA or the nucleic acid molecule encoding a CaSP, preferably at least 100 nucleotides, more preferably at least 150 or 200 nucleotides, even more preferably at least 250 or 300 nucleotides, still more preferably at least 400 or 500 nucleotides.

[0227] The substantially similar nucleic acid molecule may be a naturally occurring one that is derived from another species, especially one derived from another primate, wherein the similar nucleic acid molecule encodes an amino acid sequence that exhibits significant sequence identity to that of SEQ ID NO: 142-361 or demonstrates significant sequence identity to the nucleotide sequence of SEQ ID NO: 1-141. The similar nucleic acid molecule may also be a naturally occurring nucleic acid molecule from a human, when the CaSNA is a member of a gene family. The similar nucleic acid molecule may also be a naturally occurring nucleic acid molecule derived from a non-primate, mammalian species, including without limitation, domesticated species, e.g., dog, cat, mouse, rat, rabbit, hamster, cow, horse and pig; and wild animals, e.g., monkey, fox, lions, tigers, bears, giraffes, zebras, etc. The substantially similar nucleic acid molecule may also be a naturally occurring nucleic acid molecule derived from a non-mammalian species, such as birds or reptiles. The naturally occurring substantially similar nucleic acid molecule may be isolated directly from humans or other species. In another embodiment, the substantially similar nucleic acid molecule may be one that is experimentally produced by random mutation of a nucleic acid molecule. In another embodiment, the substantially similar nucleic acid molecule may be one that is experimentally produced by directed mutation of a CaSNA. In a preferred embodiment, the substantially similar nucleic acid molecule is an CaSNA.

[0228] The nucleic acid molecules of the present invention are also inclusive of allelic variants of a CaSNA or a nucleic acid encoding a CaSP. For example, single nucleotide polymorphisms (SNPs) occur frequently in eukaryotic genomes and the sequence determined from one individual of a species may differ from other allelic forms present within the population. More than 1.4 million SNPs have already identified in the human genome, International Human Genome Sequencing Consortium, Nature 409: 860-921 (2001)—Variants with small deletions and insertions of more than a single nucleotide are also found in the general population, and often do not alter the function of the protein. In addition, amino acid substitutions occur frequently among natural allelic variants, and often do not substantially change protein function.

[0229] In a preferred embodiment, the allelic variant is a variant of a gene, wherein the gene is transcribed into an mRNA that encodes a CaSP. In a more preferred embodiment, the gene is transcribed into an mRNA that encodes a CaSP comprising an amino acid sequence of SEQ ID NO: 142-361. In another preferred embodiment, the allelic variant is a variant of a gene, wherein the gene is transcribed into an mRNA that is a CaSNA. In a more preferred embodiment, the gene is transcribed into an mRNA that comprises the nucleic acid sequence of SEQ ID NO: 1-141. Also preferred is that the allelic variant is a naturally occurring allelic variant in the species of interest, particularly human.

[0230] Nucleic acid molecules of the present invention are also inclusive of nucleic acid sequences comprising a part of a nucleic acid sequence of the instant invention. The part may or may not encode a polypeptide, and may or may not encode a polypeptide that is a CaSP. In a preferred embodiment, the part encodes a CaSP. In one embodiment, the nucleic acid molecule comprises a part of a CaSNA. In another embodiment, the nucleic acid molecule comprises a part of a nucleic acid molecule that hybridizes or exhibits substantial sequence similarity to a CaSNA. In another embodiment, the nucleic acid molecule comprises a part of a nucleic acid molecule that is an allelic variant of a CaSNA. In yet another embodiment, the nucleic acid molecule comprises a part of a nucleic acid molecule that encodes a CaSP. A part comprises at least 10 nucleotides, more preferably at least 15, 17, 18, 20, 25, 30, 35, 40, 50, 60, 70, 80, 90, 100, 150, 200, 250, 300, 350, 400 or 500 nucleotides. The maximum size of a nucleic acid part is one nucleotide shorter than the sequence of the nucleic acid molecule encoding the full-length protein.

[0231] Nucleic acid molecules of the present invention are also inclusive of nucleic acid sequences that encode fusion proteins, homologous proteins, polypeptide fragments, muteins and polypeptide analogs, as described infra.

[0232] Nucleic acid molecules of the present invention are also inclusive of nucleic acid sequences containing modifications of the native nucleic acid molecule. Examples of such modifications include, but are not limited to, normative internucleoside bonds, post-synthetic modifications or altered nucleotide analogues. One having ordinary skill in the art would recognize that the type of modification that may be made will depend upon the intended use of the nucleic acid molecule. For instance, when the nucleic acid molecule is used as a hybridization probe, the range of such modifications will be limited to those that permit sequence-discriminating base pairing of the resulting nucleic acid. When used to direct expression of RNA or protein in vitro or in vivo, the range of such modifications will be limited to those that permit the nucleic acid to function properly as a polymerization substrate. When the isolated nucleic acid is used as a therapeutic agent, the modifications will be limited to those that do not confer toxicity upon the isolated nucleic acid.

[0233] Accordingly, in one embodiment, a nucleic acid molecule may include nucleotide analogues that incorporate labels that are directly detectable, such as radiolabels or fluorophores, or nucleotide analogues that incorporate labels that can be visualized in a subsequent reaction, such as biotin or various haptens. The labeled nucleic acid molecules are particularly useful as hybridization probes.

[0234] Common radiolabeled analogues include those labeled with ³³P, ³²P, and ³⁵S, such as α-³²P-dATP, α-³²P-dCTP, α-³²P-dGTP, α-³²P-dTTP, α-³²P-3′dATP, α-³²P-ATP, α-³²P-CTP, α-³²P-GTP, α-³²P-UTP, α-³⁵S-dATP, γ-³⁵S-GTP, γ-³³P-dATP, and the like.

[0235] Commercially available fluorescent nucleotide analogues readily incorporated into the nucleic acids of the present invention include Cy3-dCTP, Cy3-dUTP, Cy5-dCTP, Cy3-dUTP (Amersham Biosciences, Piscataway, N.J., USA), fluorescein-12-dUTP, tetramethylrhodamine-6-dUTP, Texas Redg-5-dUTP, Cascade Blue®-7-dUTP, BODIPY® FL-14-dUTP, BODIPY® TMR-14-dUTP, BODIPY® TR-14-dUTP, Rhodamine Green™-5-dUTP, Oregon Green® 488-5-dUTP, Texas Red®-12-dUTP, BODIPY® 630/650-14-dUTP, BODIPY® 650/665-14-dUTP, Alexa Fluor® 488-5-dUTP, Alexa Fluor® 532-5-dUTP, Alexa Fluor® 568-5-dUTP, Alexa Fluor® 594-5-dUTP, Alexa Fluor® 546-14-dUTP, fluorescein-12-UTP, tetramethylrhodamine-6-UTP, Texas Red®-5-UTP, Cascade Blue®-7-UTP, BODIPY® FL-14-UTP, BODIPY® TMR-14-UTP, BODIPY® TR-14-UTP, Rhodamine Green™-5-UTP, Alexa Fluor®D 488-5-UTP, Alexa Fluor® 546-14-UTP (Molecular Probes, Inc. Eugene, Oreg., USA). One may also custom synthesize nucleotides having other fluorophores. See Henegariu et al., Nature Biotechnol. 18: 345-348 (2000).

[0236] Haptens that are commonly conjugated to nucleotides for subsequent labeling include biotin (biotin-11-dUTP, Molecular Probes, Inc., Eugene, Oreg., USA; biotin-21-UTP, biotin-21-dUTP, Clontech Laboratories, Inc., Palo Alto, Calif., USA), digoxigenin (DIG-11-dUTP, alkali labile, DIG-11-UTP, Roche Diagnostics Corp., Indianapolis, Ind., USA), and dinitrophenyl (dinitrophenyl-11-dUTP, Molecular Probes, Inc., Eugene, Oreg., USA).

[0237] Nucleic acid molecules of the present invention can be labeled by incorporation of labeled nucleotide analogues into the nucleic acid. Such analogues can be incorporated by enzymatic polymerization, such as by nick translation, random priming, polymerase chain reaction (PCR), terminal transferase tailing, and end-filling of overhangs, for DNA molecules, and in vitro transcription driven, e.g., from phage promoters, such as T7, T3, and SP6, for RNA molecules. Commercial kits are readily available for each such labeling approach. Analogues can also be incorporated during automated solid phase chemical synthesis. Labels can also be incorporated after nucleic acid synthesis, with the 5′ phosphate and 3′ hydroxyl providing convenient sites for post-synthetic covalent attachment of detectable labels.

[0238] Other post-synthetic approaches also permit internal labeling of nucleic acids. For example, fluorophores can be attached using a cisplatin reagent that reacts with the N7 of guanine residues (and, to a lesser extent, adenine bases) in DNA, RNA, and Peptide Nucleic Acids (PNA) to provide a stable coordination complex between the nucleic acid and fluorophore label (Universal Linkage System) (available from Molecular Probes, Inc., Eugene, Oreg., USA and Amersham Pharmacia Biotech, Piscataway, N.J., USA); see Alers et al., Genes, Chromosomes & Cancer 25: 301-305 (1999); Jelsma et al., J. NIH Res. 5: 82 (1994); Van Belkum et al., BioTechniques 16: 148-153 (1994). Alternatively, nucleic acids can be labeled using a disulfide-containing linker (FastTag™ Reagent, Vector Laboratories, Inc., Burlingame, Calif., USA) that is photo- or thermally coupled to the target nucleic acid using aryl azide chemistry; after reduction, a free thiol is available for coupling to a hapten, fluorophore, sugar, affinity ligand, or other marker.

[0239] One or more independent or interacting labels can be incorporated into the nucleic acid molecules of the present invention. For example, both a fluorophore and a moiety that in proximity thereto acts to quench fluorescence can be included to report specific hybridization through release of fluorescence quenching or to report exonucleotidic excision. See, e.g. Tyagi et al., Nature Biotechnol. 14: 303-308 (1996); Tyagi et al., Nature Biotechnol. 16: 49-53 (1998); Sokol et al., Proc. Natl. Acad. Sci. USA 95: 11538-11543 (1998); Kostrikis et al., Science 779:1228-1229 (1998); Marras et al., Genet. Anal. 14: 151-156 (1999); Holland et al., Proc. Natl. Acad. Sci. USA 88: 7276-7280 (1991); Heid et al., Genome Res. 6(10): 986-94 (1996); Kuimelis et al., Nucleic Acids Symp. Ser. (37): 255-6 (1997); and U.S. Pat. Nos. 5,846,726, 5,925,517, 5,925,517, 5,723,591 and 5,538,848, the disclosures of which are incorporated herein by reference in their entireties.

[0240] Nucleic acid molecules of the present invention may also be modified by altering one or more native phosphodiester internucleoside bonds to more nuclease-resistant, internucleoside bonds. See Hartmann et al. (eds.), Manual of Antisense Methodology: Perspectives in Antisense Science, Kluwer Law International (1999); Stein et al. (eds.), Applied Antisense Oligonucleotide Technology, Wiley-Liss (1998); Chadwick et al. (eds.), Oligonucleotides as Therapeutic Agents—Symposium No. 209, John Wiley & Son Ltd (1997). Such altered internucleoside bonds are often desired for techniques or for targeted gene correction, Gamper et al., Nucl. Acids Res. 28(21): 4332-4339 (2000). For double stranded RNA inhibition which may utilize either natural ds RNA or ds RNA modified in its, sugar, phosphate or base, see Hannon, Nature 418(11): 244-251 (2002); Fire et al. in WO 99/32619; Tuschl et al. in US2002/0086356; Kruetzer et al. in WO 00/44895, the disclosures of which are incorporated herein by reference in their entirety. For circular antisense, see Kool in U.S. Pat. No. 5,426,180, the disclosure of which is incorporated herein by reference in its entirety.

[0241] Modified oligonucleotide backbones include, without limitation, phosphorothioates, chiral phosphorothioates, phosphorodithioates, phosphotriesters, aminoalkylphosphotriesters, methyl and other alkyl phosphonates including 3′-alkylene phosphonates and chiral phosphonates, phosphinates, phosphoramidates including 3′-amino phosphoramidate and aminoalkylphosphoramidates, thionophosphoramidates, thionoalkylphosphonates, thionoalkylphosphotriesters, and boranophosphates having normal 3′-5′ linkages, 2′-5′ linked analogs of these, and those having inverted polarity wherein the adjacent pairs of nucleoside units are linked 3′-5′ to 5′-3′ or 2′-5′ to 5′-2′. Representative U.S. Patents that teach the preparation of the above phosphorus-containing linkages include, but are not limited to, U.S. Pat. Nos. 3,687,808; 4,469,863; 4,476,301; 5,023,243; 5,177,196; 5,188,897; 5,264,423; 5,276,019; 5,278,302; 5,286,717; 5,321,131; 5,399,676; 5,405,939; 5,453,496; 5,455,233; 5,466,677; 5,476,925; 5,519,126; 5,536,821; 5;541,306; 5,550,111; 5,563,253; 5,571,799; 5587,361; and 5,625,050, the disclosures of which are incorporated herein by reference in their entireties. In a preferred embodiment, the modified internucleoside linkages may be used for antisense techniques.

[0242] Other modified olignucleotide backbones do not include a phosphorus atom, but have backbones that are formed by short chain alkyl or cycloalkyl internucleoside linkages, mixed heteroatom and alkyl or cycloalkyl internucleoside linkages, or one or more short chain heteroatomic or heterocyclic internucleoside linkages. These include those having morpholino linkages (formed in part from the sugar portion of a nucleoside); siloxane backbones; sulfide, sulfoxide and sulfone backbones; formacetyl and thioformacetyl backbones; methylene formacetyl and thioformacetyl backbones; alkene containing backbones; sulfamate backbones; methyleneimino and methylenehydrazino backbones; sulfonate and sulfonamide backbones; amide backbones; and others having mixed N, O, S and CH₂ component parts. Representative U.S. patents that teach the preparation of the above backbones include, but are not limited to, U.S. Pat. Nos. 5,034,506; 5,166,315; 5,185,444; 5,214,134; 5,216,141; 5,235,033; 5,264,562; 5,264,564; 5,405,938; 5,434,257; 5,466,677; 5,470,967; 5,489,677; 5,541,307; 5,561,225; 5,596,086; 5,602,240; 5,610,289; 5,602,240; 5,608,046; 5,610,289; 5,618,704; 5,623,070; 5,663,312; 5,633,360; 5,677,437 and 5,677,439; the disclosures of which are incorporated herein by reference in their entireties.

[0243] In other preferred nucleic acid molecules, both the sugar and the internucleoside linkage are replaced with novel groups, such as peptide nucleic acids (PNA). In PNA compounds, the phosphodiester backbone of the nucleic acid is replaced with an amide-containing backbone, in particular by repeating N-(2-aminoethyl) glycine units linked by amide bonds. Nucleobases are bound directly or indirectly to aza nitrogen atoms of the amide portion of the backbone, typically by methylene carbonyl linkages. PNA can be synthesized using a modified peptide synthesis protocol. PNA oligomers can be synthesized by both Fmoc and tBoc methods. Representative U.S. patents that teach the preparation of PNA compounds include, but are not limited to, U.S. Pat. Nos. 5,539,082; 5,714,331; and 5,719,262, each of which is herein incorporated by reference in its entirety. Automated PNA synthesis is readily achievable on commercial synthesizers (see, e.g., “PNA User's Guide,” Rev. 2, February 1998, Perseptive Biosystems Part No. 60138, Applied Biosystems, Inc., Foster City, Calif.). PNA molecules are advantageous for a number of reasons. First, because the PNA backbone is uncharged, PNA/DNA and PNA/RNA duplexes have a higher thermal stability than is found in DNA/DNA and DNA/RNA duplexes. The Tm of a PNA/DNA or PNA/RNA duplex is generally 1° C. higher per base pair than the Tm of the corresponding DNA/DNA or DNA/RNA duplex (in 100 mM NaCl). Second, PNA molecules can also form stable PNA/DNA complexes at low ionic strength, under conditions in which DNA/DNA duplex formation does not occur. Third, PNA also demonstrates greater specificity in binding to complementary DNA because a PNA/DNA mismatch is more destabilizing than DNA/DNA mismatch. A single mismatch in mixed a PNA/DNA 15-mer lowers the Tm by 8-20° C. (15° C. on average). In the corresponding DNA/DNA duplexes, a single mismatch lowers the Tm by 4-16° C. (11° C. on average). Because PNA probes can be significantly shorter than DNA probes, their specificity is greater. Fourth, PNA oligomers are resistant to degradation by enzymes, and the lifetime of these compounds is extended both in vivo and in vitro because nucleases and proteases do not recognize the PNA polyamide backbone with nucleobase sidechains. See, e.g., Ray et al., FASEB J. 14(9): 1041-60 (2000); Nielsen et al., Pharmacol Toxicol. 86(1): 3-7 (2000); Larsen et al., Biochim Biophys Acta. 1489(1): 159-66 (1999); Nielsen, Curr. Opin. Struct. Biol. 9(3): 353-7 (1999), and Nielsen, Curr. Opin. Biotechnol. 10(1): 71-5 (1999).

[0244] Nucleic acid molecules may be modified compared to their native structure throughout the length of the nucleic acid molecule or can be localized to discrete portions thereof. As an example of the latter, chimeric nucleic acids can be synthesized that have discrete DNA and RNA domains and that can be used for targeted gene repair and modified PCR reactions, as further described in, Misra et al., Biochem. 37: 1917-1925 (1998); and Finn et al., Nucl. Acids Res. 24: 3357-3363 (1996), and U.S. Pat. Nos. 5,760,012 and 5,731,181, the disclosures of which are incorporated herein by reference in their entireties.

[0245] Unless otherwise specified, nucleic acid molecules of the present invention can include any topological conformation appropriate to the desired use; the term thus explicitly comprehends, among others, single-stranded, double-stranded, triplexed, quadruplexed, partially double-stranded, partially-triplexed, partially-quadruplexed, branched, hairpinned, circular, and padlocked conformations: Padlock conformations and their utilities are further described in Banér et al., Curr. Opin. Biotechnol. 12: 11-15 (2001); Escude et al., Proc. Natl. Acad. Sci. USA 14: 96(19):10603-7 (1999); and Nilsson et al., Science 265(5181): 2085-8 (1994). Triplex and quadruplex conformations, and their utilities, are reviewed in Praseuth et al., Biochim. Biophys. Acta. 1489(i): 181-206 (1999); Fox, Curr. Med. Chem. 7(1): 17-37 (2000); Kochetkova et al., Methods Mol. Biol. 130: 189-201 (2000); Chan et al., J. Mol. Med. 75(4): 267-82 (1997); Rowley et al; Mol Med 5(10): 693-700 (1999); Kool, Annu Rev Biophys Biomol Struct. 25: 1-28 (1996).

[0246] SNP Polymorphisms

[0247] Commonly, sequence differences between individuals involve differences in single ucleotide positions. SNPs may account for 90% of human DNA polymorphism. Collins et al., 8 Genome Res. 1229-31 (1998). SNPs include single base pair positions in genomic DNA at which different sequence alternatives (alleles) exist in a population. In addition, the least frequent allele generally must occur at a frequency of 1% or greater. DNA sequence variants with a reasonably high population frequency are observed approximately every 1,000 nucleotide across the genome, with estimates as high as 1 SNP per 350 base pairs. Wang et al., 280 Science 1077-82 (1998); Harding et al., 60 Am. J. Human Genet. 772-89 (1997); Taillon-Miller et al., 8 Genome Res. 748-54 (1998); Cargill et al., 22 Nat. Genet. 231-38 (1999); and Semple et al., 16 Bioinform. Disc. Note 735-38 (2000). The frequency of SNPs varies with the type and location of the change. In base substitutions, two-thirds of the substitutions involve the C-T and G-A type. This variation in frequency can be related to 5-methylcytosine deamination reactions that occur frequently, particularly at CpG dinucleotides. Regarding location, SNPs occur at a much higher frequency in non-coding regions than in coding regions. Information on over one million variable sequences is already publicly available via the Internet and more such markers are available from commercial providers of genetic information. Kwok and Gu, 5 Med. Today 538-53 (1999).

[0248] Several definitions of SNPs exist. See, e.g., Brooks, 235 Gene 177-86 (1999). As used herein, the term “single nucleotide polymorphism” or “SNP” includes all single base variants, thus including nucleotide insertions and deletions in addition to single nucleotide substitutions. There are two types of nucleotide substitutions. A transition is the replacement of one purine by another purine or one pyrimidine by another pyrimidine. A transversion is the replacement of a purine for a pyrimidine, or vice versa.

[0249] Numerous methods exist for detecting SNPs within a nucleotide sequence. A review of many of these methods can be found in Landegren et al., 8 Genome Res. 769-76 (1998). For example, a SNP in a genomic sample can be detected by preparing a Reduced Complexity Genome (RCG) from the genomic sample, then analyzing the RCG for the presence or absence of a SNP. See, e.g., WO 00/18960. Multiple SNPs in a population of target polynucleotides in parallel can be detected using, for example, the methods of WO 00/50869. Other SNP detection methods include the methods of U.S. Pat. Nos. 6,297,018 and 6,322,980. Furthermore, SNPs can be detected by restriction fragment length polymorphism (RFLP) analysis. See, e.g., U.S. Pat. Nos. 5,324,631; 5,645,995. RFLP analysis of SNPs, however, is limited to cases where the SNP either creates or destroys a restriction enzyme cleavage site. SNPs can also be detected by direct sequencing of the nucleotide sequence of interest. In addition, numerous assays based on hybridization have also been developed to detect SNPs and mismatch distinction by polymerases and ligases. Several web sites provide information about SNPs including Ensembl (www.ensembl.org), Sanger Institute (http://www.sanger.ac.uk/genetics/exon/), National Center for Biotechnology Information (NCBI) (http://www.ncbi.nlm.nih.gov/SNP/), The SNP Consortium Ltd. (http://snp.cshl.org/). The chromosomal locations for the compositions disclosed herein are provided below. In addition, one of ordinary skill in the art could perform a search against the genome or any of the databases cited above using BLAST to find the chromosomal location or locations of SNPs. Another a preferred method to find the genomic coordinates and associated SNPs would be to use the BLAT tool (genome.ucsc.edu, Kent et al. 2001, The Human Genome Browser at UCSC, Genome Research 996-1006 or Kent 2002 BLAT, The BLAST-Like Alignment Tool Genome Reseach, 1-9). All web sites above were accessed Dec. 3, 2003.

[0250] RNA Interference

[0251] RNA interference refers to the process of sequence-specific post transcriptional gene silencing in animals mediated by short interfering RNAs (siRNA). Fire et al., 1998, Nature, 391, 806. The corresponding process in plants is commonly referred to as post transcriptional gene silencing or RNA silencing and is also referred to as quelling in fungi. The process of post transcriptional gene silencing is thought to be an evolutionarily conserved cellular defense mechanism used to prevent the expression of foreign genes which is commonly shared by diverse flora and phyla. Fire et al., 1999, Trends Genet., 15, 358. Such protection from foreign gene expression may have evolved in response to the production of double stranded RNAs (dsRNA) derived from viral infection or the random integration of transposon elements into a host genome via a cellular response that specifically destroys homologous single stranded RNA or viral genomic RNA. The presence of dsRNA in cells triggers the RNAi response though a mechanism that has yet to be fully characterized. This mechanism appears to be different from the interferon response that results from dsRNA mediated activation of protein kinase PKR and 2′,5′-oligoadenylate synthetase resulting in non-specific cleavage of mRNA by ribonuclease L.

[0252] The presence of long dsRNAs in cells stimulates the activity of a ribonuclease III enzyme referred to as dicer. Dicer is involved in the processing of the dsRNA into short pieces of dsRNA known as short interfering RNAs (siRNA). Berstein et al., 2001, Nature, 409, 363. Short interfering RNAs derived from dicer activity are typically about 21-23 nucleotides in length and comprise about 19 base pair duplexes. Dicer has also been implicated in the excision of 21 and 22 nucleotide small temporal RNAs (stRNA) from precursor RNA of conserved structure that are implicated in translational control. Hutvagner et al., 2001, Science, 293, 834. The RNAi response also features an endonuclease complex containing a siRNA, commonly referred to as an RNA-induced silencing complex (RISC), which mediates cleavage of single stranded RNA having sequence complementary to the antisense strand of the siRNA duplex. Cleavage of the target RNA takes place in the middle of the region complementary to the antisense strand of the siRNA duplex. Elbashir et al., 2001, Genes Dev., 15, 188.

[0253] Short interfering RNA mediated RNAi has been studied in a variety of systems. Fire et al., 1998, Nature, 391, 806, were the first to observe RNAi in C. Elegans. Wianny and Goetz, 1999, Nature Cell Biol., 2, 70, describe RNAi mediated by dsRNA in mouse embryos. Hammond et al., 2000, Nature, 404, 293, describe RNAi in Drosophila cells transfected with dsRNA. Elbashir et al., 2001, Nature, 411, 494, describe RNAi induced by introduction of duplexes of synthetic 21-nucleotide RNAs in cultured mammalian cells including human embryonic kidney and HeLa cells. Recent work in Drosophila embryonic lysates (Elbashir et al., 2001, EMBO J, 20, 6877) has revealed certain requirements for siRNA length, structure, chemical composition, and sequence that are essential to mediate efficient RNAi activity. These studies have shown that 21 nucleotide siRNA duplexes are most active when containing two nucleotide 3′-overhangs. Furthermore, complete substitution of one or both siRNA strands with 2′-deoxy (2′-H) or 2′-O-methyl nucleotides abolishes RNAi activity, whereas substitution of the 3′-terminal siRNA overhang nucleotides with deoxy nucleotides (2′-H) was shown to be tolerated. Single mismatch sequences in the center of the siRNA duplex where also shown to abolish RNAi activity. In addition, these studies also indicate that the position of the cleavage site in the target RNA is defined by the 5′-end of the siRNA guide sequence rather than the 3′-end. Elbashir et al., 2001, EMBO J., 20, 6877. Other studies have indicated that a 5′-phosphate on the target-complementary strand of a siRNA duplex is required for siRNA activity and that ATP is utilized to maintain the 5′-phosphate moiety on the siRNA. Nykanen et al., 2001, Cell, 107, 309.

[0254] Studies have shown that replacing the 3′-overhanging segments of a 21-mer siRNA duplex having 2 nucleotide 3′ overhangs with deoxyribonucleotides does not have an adverse effect on RNAi activity. Replacing up to 4 nucleotides on each end of the siRNA with deoxyribonucleotides has been reported to be well tolerated whereas complete substitution with deoxyribonucleotides results in no RNAi activity. Elbashir et al., 2001, EMBO J., 20, 6877. In addition, Elbashir et al., supra, also report that substitution of siRNA with 2′-O-methyl nucleotides completely abolishes RNAi activity. Li et al., WO 00/44914, and Beach et al., WO 01/68836 both suggest that siRNA “may include modifications to either the phosphate-sugar back bone or the nucleoside to include at least one of a nitrogen or sulfur heteroatom”, however neither application teaches to what extent these modifications are tolerated in siRNA molecules nor provide any examples of such modified siRNA. Kreutzer and Limmer, Canadian Patent Application No. 2,359,180, also describe certain chemical modifications for use in dsRNA constructs in order to counteract activation of double stranded-RNA-dependent protein kinase PKR, specifically 2′-amino or 2′-O-methyl nucleotides, and nucleotides containing a 2′-O or 4′-C methylene bridge. However, Kreutzer and Limmer similarly fail to show to what extent these modifications are tolerated in siRNA molecules nor do they provide any examples of such modified siRNA.

[0255] Parrish et al., 2000, Molecular Cell, 6, 1977-1087, tested certain chemical modifications targeting the unc-22 gene in C. elegans using long (>25 nt) siRNA transcripts. The authors describe the introduction of thiophosphate residues into these siRNA transcripts by incorporating thiophosphate nucleotide analogs with T7 and T3 RNA polymerase and observed that “RNAs with two [phosphorothioate] modified bases also had substantial decreases in effectiveness as RNAi triggers; [phosphorothioate] modification of more than two residues greatly destabilized the RNAs in vitro and we were not able to assay interference activities.” Id. at 1081. The authors also tested certain modifications at the 2′-position of the nucleotide sugar in the long siRNA transcripts and observed that substituting deoxynucleotides for ribonucleotides “produced a substantial decrease in interference activity”, especially in the case of Uridine to Thymidine and/or Cytidine to deoxy-Cytidine substitutions. Id. In addition, the authors tested certain base modifications, including substituting 4-thiouracil, 5-bromouracil, 5-iodouracil, 3-(aminoallyl)uracil for uracil, and inosine for guanosine in sense and antisense strands of the siRNA, and found that whereas 4-thiouracil and 5-bromouracil were all well tolerated, inosine “produced a substantial decrease in interference activity” when incorporated in either strand. Incorporation of 5-iodouracil and 3-(aminoallyl)uracil in the antisense strand resulted in substantial decrease in RNAi activity as well.

[0256] Beach et al., WO 01/68836, describes specific methods for attenuating gene expression using endogenously derived dsRNA. Tuschl et al., WO 01/75164, describes a Drosophila in vitro RNAi system and the use of specific siRNA molecules for certain functional genomic and certain therapeutic applications; although Tuschl, 2001, Chem. Biochem., 2, 239-245, doubts that RNAi can be used to cure genetic diseases or viral infection due “to the danger of activating interferon response”. Li et al., WO 00/44914, describes the use of specific dsRNAs for use in attenuating the expression of certain target genes. Zernicka-Goetz et al., WO 01/36646, describes certain methods for inhibiting the expression of particular genes in mammalian cells using certain dsRNA molecules. Fire et al., WO 99/32619, U.S. Pat. No. 6,506,559, the contents of which are hereby incorporated by reference, describes particular methods for introducing certain dsRNA molecules into cells for use in inhibiting gene expression. Plaetinck et al., WO 00/01846, describes certain methods for identifying specific genes responsible for conferring a particular phenotype in a cell using specific dsRNA molecules. Mello et al., WO 01/29058, describes the identification of specific genes involved in dsRNA mediated RNAi. Deschamps Depaillette et al., International PCT Publication No. WO 99/07409, describes specific compositions consisting of particular dsRNA molecules combined with certain anti-viral agents. Driscoll et al., International PCT Publication No. WO 01/49844, describes specific DNA constructs for use in facilitating gene silencing in targeted organisms. Parrish et al.,-2000, Molecular Cell, 6; 1977-1087, describes specific chemically modified siRNA constructs targeting the unc-22 gene of C. elegans. Tuschl et al., International PCT Publication No. WO 02/44321, describe certain synthetic siRNA constructs.

[0257] Methods for Using Nucleic Acid Molecules as Probes and Primers

[0258] The isolated nucleic acid molecules of the present invention can be used as hybridization probes to detect, characterize, and quantify hybridizing nucleic acids in, and isolate hybridizing nucleic acids from, both genomic and transcript-derived nucleic acid samples. When free in solution, such probes are typically, but not invariably, detectably labeled; bound to a substrate, as in a microarray, such probes are typically, but not invariably unlabeled.

[0259] In one embodiment, the isolated nucleic acid molecules of the present invention can be used as probes to detect and characterize gross alterations in the gene of a CaSNA, such as deletions, insertions, translocations, and duplications of the CaSNA genomic locus through fluorescence in situ hybridization (FISH) to chromosome spreads. See, e.g., Andreeff et al. (eds.), Introduction to Fluorescence In Situ Hybridization: Principles and Clinical Applications, John Wiley & Sons (1999). The isolated nucleic acid molecules of the present invention can be used as probes to assess smaller genomic alterations using, e.g., Southern blot detection of restriction fragment length polymorphisms. The isolated nucleic acid molecules of the present invention can be used as probes to isolate genomic clones that include a nucleic acid molecule of the present invention, which thereafter can be restriction mapped and sequenced to identify deletions, insertions, translocations, and substitutions (single nucleotide polymorphisms, SNPs) at the sequence level. Alternatively, detection techniques such as molecular beacons may be used, see Kostrikis et al. Science 279:1228-1229 (1998).

[0260] The isolated nucleic acid molecules of the present invention can be also be used as probes to detect, characterize, and quantify CaSNA in, and isolate CaSNA from, transcript-derived nucleic acid samples. In one embodiment, the isolated nucleic acid molecules of the present invention can be used as hybridization probes to detect, characterize by length, and quantify mRNA by Northern blot of total or poly-A⁺-selected RNA samples. In another embodiment, the isolated nucleic acid molecules of the present invention can be used as hybridization probes to detect, characterize by location, and quantify mRNA by in site hybridization to tissue sections. See; e.g., Schwarchzacher et al., In Situ Hybridization, Springer-Verlag New York (2000). In another preferred embodiment, the isolated nucleic acid molecules of the present invention can be used as hybridization probes to measure the representation of clones in a cDNA library or to isolate hybridizing nucleic acid molecules acids from cDNA libraries, permitting sequence level characterization of mRNAs that hybridize to CaSNAs, including, without limitations, identification of deletions, insertions, substitutions, truncations, alternatively spliced forms and single nucleotide polymorphisms. In yet another preferred embodiment, the nucleic acid molecules of the instant invention may be used in microarrays.

[0261] All of the aforementioned probe techniques are well within the skill in the art, and are described at greater length in standard texts such as Sambrook (2001), supra; Ausubel (1999), supra; and Walker et al. (eds.), The Nucleic Acids Protocols Handbook, Humana Press (2000).

[0262] In another embodiment, a nucleic acid molecule of the invention may be used as a probe or primer to identify and/or amplify a second nucleic acid molecule that selectively hybridizes to the nucleic acid molecule of the invention. In this embodiment, it is preferred that the probe or primer be derived from a nucleic acid molecule encoding a CaSP. More preferably, the probe or primer is derived from a nucleic acid molecule encoding a polypeptide having an amino acid sequence of SEQ ID NO: 142-361. Also preferred are probes or primers derived from a CaSNA. More preferred are probes or primers derived from a nucleic acid molecule having a nucleotide sequence of SEQ ID NO: 1-141.

[0263] In general, a probe or primer is at least 10 nucleotides in length, more preferably at least 12, more preferably at least 14 and even more preferably at least 16 or 17 nucleotides in length. In an even more preferred embodiment, the probe or primer is at least 18 nucleotides in length, even more preferably at least 20 nucleotides and even more preferably at least 22 nucleotides in length. Primers and probes may also be longer in length. For instance, a probe or primer may be 25 nucleotides in length, or may be 30, 40 or 50 nucleotides in length. Methods of performing nucleic acid hybridization using oligonucleotide probes are well known in the art. See, e.g., Sambrook et al., 1989, supra, Chapter 11 and pp. 11.31-11.32 and 11.40-11.44, which describes radiolabeling of short probes, and pp. 11.45-11.53, which describe hybridization conditions for oligonucleotide probes, including specific conditions for probe hybridization (pp. 11.50-11.51).

[0264] Methods of performing primer-directed amplification are also well known in the art. Methods for performing the polymerase chain reaction (PCR) are compiled, inter alia, in McPherson, PCR Basics: From Background to Bench, Springer Verlag (2000); Innis et al. (eds.), PCR Applications: Protocols for Functional Genomics, Academic Press (1999); Gelfand et al. (eds.), PCR Strategies, Academic Press (1998); Newton et al., PCR, Springer-Verlag New York (1997); Burke (ed.), PCR: Essential Techniques, John Wiley & Son Ltd (1996); White (ed.), PCR Cloning Protocols: From Molecular Cloning to Genetic Engineering, Vol. 67, Humana Press (1996); and McPherson et al. (eds.), PCR 2: A Practical Approach, Oxford University Press, Inc. (1995). Methods for performing RT-PCR are collected, e.g., in Siebert et al. (eds.), Gene Cloning and Analysis by RT-PCR, Eaton Publishing Company/Bio Techniques Books Division, 1998; and Siebert (ed.), PCR Technique:RT-PCR, Eaton Publishing Company/BioTechniques Books (1995).

[0265] PCR and hybridization methods may be used to identify and/or isolate nucleic acid molecules of the present invention including allelic variants, homologous nucleic acid molecules and fragments. PCR and hybridization methods may also be used to identify, amplify and/or isolate nucleic acid molecules of the present invention that encode homologous proteins, analogs, fusion protein or muteins of the invention. Nucleic acid primers as described herein can be used to prime amplification of nucleic acid molecules of the invention, using transcript-derived or genomic DNA as template.

[0266] These nucleic acid primers can also be used, for example, to prime single base extension (SBE) for SNP detection (See, e.g., U.S. Pat. No. 6,004,744, the disclosure of which is incorporated herein by reference in its entirety).

[0267] Isothermal amplification approaches, such as rolling circle amplification, are also now well-described. See, e.g., Schweitzer et al., Curr. Opin. Biotechnol. 12(1): 21-7 (2001); international patent publications WO 97/19193 and WO 00/15779, and U.S. Pat. Nos. 5,854,033 and 5,714,320, the disclosures of which are incorporated herein by reference in their entireties. Rolling circle amplification can be combined with other techniques to facilitate SNP detection. See, e.g., Lizardi et al., Nature Genet. 19(3): 225-32 (1998).

[0268] Nucleic acid molecules of the present invention may be bound to a substrate either covalently or noncovalently. The substrate can be porous or solid, planar or non-planar, unitary or distributed. The bound nucleic acid molecules may be used as hybridization probes, and may be labeled or unlabeled. In a preferred embodiment, the bound nucleic acid molecules are unlabeled.

[0269] In one embodiment, the nucleic acid molecule of the present invention is bound to a porous substrate, e.g., a membrane, typically comprising nitrocellulose, nylon, or positively charged derivatized nylon. The nucleic acid molecule of the present invention can be used to detect a hybrid nucleic acid molecule that is present within a labeled nucleic acid sample, e.g., a sample of transcript-derived nucleic acids. In another embodiment, the nucleic acid molecule is bound to a solid substrate, including, without limitation, glass, amorphous silicon, crystalline silicon or plastics. Examples of plastics include, without limitation, polymethylacrylic, polyethylene, polypropylene, polyacrylate, polymethylmethacrylate, polyvinylchloride, polytetrafluoroethylene, polystyrene, polycarbonate, polyacetal, polysulfone, celluloseacetate, cellulosenitrate, nitrocellulose, or mixtures thereof. The solid substrate may be any shape, including rectangular, disk-like and spherical. In a preferred embodiment, the solid substrate is a microscope slide or slide-shaped substrate.

[0270] The nucleic acid molecule of the present invention can be attached covalently to a surface of the support substrate or applied to a derivatized surface in a chaotropic agent that facilitates denaturation and adherence by presumed noncovalent interactions, or some combination thereof. The nucleic acid molecule of the present invention can be bound to a substrate to which a plurality of other nucleic acids are concurrently bound, hybridization to each of the plurality of bound nucleic acids being separately detectable. At low density, e.g. on a porous membrane, these substrate-bound collections are typically denominated macroarrays; at higher density, typically on a solid support, such as glass, these substrate bound collections of plural nucleic acids are colloquially termed microarrays. As used herein, the term microarray includes arrays of all densities. It is, therefore, another aspect of the invention to provide microarrays that comprise one or more of the nucleic acid molecules of the present invention.

[0271] In yet another embodiment, the invention is directed to single exon probes based on the CaSNAs disclosed herein.

[0272] Expression Vectors, Host Cells and Recombinant Methods of Producing Polypeptides

[0273] Another aspect of the present invention provides vectors that comprise one or more of the isolated nucleic acid molecules of the present invention, and host cells in which such vectors have been introduced.

[0274] The vectors can be used, inter alia, for propagating the nucleic acid molecules of the present invention in host cells (cloning vectors), for shuttling the nucleic acid molecules of the present invention between host cells derived from disparate organisms (shuttle vectors), for inserting the nucleic acid molecules of the present invention into host cell chromosomes (insertion vectors), for expressing sense or antisense RNA transcripts of the nucleic acid molecules of the present invention in vitro or within a host cell, and for expressing polypeptides encoded by the nucleic acid molecules of the present invention, alone or as fusion proteins with heterologous polypeptides (expression vectors). Vectors are by now well known in the art, and are described, inter alia, in Jones et al. (eds.), Vectors: Cloning Applications: Essential Techniques (Essential Techniques Series), John Wiley & Son Ltd. (1998); Jones et al. (eds.), Vectors: Expression Systems: Essential Techniques (Essential Techniques Series), John Wiley & Son Ltd. (1998); Gacesa et al., Vectors: Essential Data, John Wiley & Sons Ltd. (1995); Cid-Arregui (eds.), Viral Vectors: Basic Science and Gene Therapy, Eaton Publishing Co. (2000); Sambrook (2001), supra; Ausubel (1999), supra. Furthermore, a variety of vectors are available commercially. Use of existing vectors and modifications thereof are well within the skill in the art. Thus, only basic features need be described here.

[0275] Nucleic acid sequences may be expressed by operatively linking them to an expression control sequence in an appropriate expression vector and employing that expression vector to transform an appropriate unicellular host. Expression control sequences are sequences that control the transcription, post-transcriptional events and translation of nucleic acid sequences. Such operative linking of a nucleic sequence of this invention to an expression control sequence, of course, includes, if not already part of the nucleic acid sequence, the provision of a translation initiation codon, ATG or GTG, in the correct reading frame upstream of the nucleic acid sequence.

[0276] A wide variety of host/expression vector combinations may be employed in expressing the nucleic acid sequences of this invention. Useful expression vectors, for example, may consist of segments of chromosomal, non-chromosomal and synthetic nucleic acid sequences.

[0277] In one embodiment, prokaryotic cells may be used with an appropriate vector. Prokaryotic host cells are often used for cloning and expression. In a preferred embodiment, prokaryotic host cells include E. coli, Pseudomonas, Bacillus and Streptomyces. In a preferred embodiment, bacterial host cells are used to express the nucleic acid molecules of the instant invention. Useful expression vectors for bacterial hosts include bacterial plasmids, such as those from E. coli, Bacillus or Streptomyces, including pBluescript, pGEX-2T, pUC vectors, col E1, pCR1, pBR322, pMB9 and their derivatives, wider host range plasmids, such as RP4, phage DNAs, e.g., the numerous derivatives of phage lambda, e.g., NM989, λGT10 and λGT11, and other phages, e.g., M13 and filamentous single stranded phage DNA. Where E. coli is used as host, selectable markers are, analogously, chosen for selectivity in gram negative bacteria: e.g., typical markers confer resistance to antibiotics, such as ampicillin, tetracycline, chloramphenicol, kanamycin, streptomycin and zeocin; auxotrophic markers can also be used.

[0278] In other embodiments, eukaryotic host cells, such as yeast, insect, mammalian or plant cells, may be used. Yeast cells, typically S. cerevisiae, are useful for eukaryotic genetic studies, due to the ease of targeting genetic changes by homologous recombination and the ability to easily complement genetic defects using recombinantly expressed proteins. Yeast cells are useful for identifying interacting protein components, e.g. through use of a two-hybrid system. In a preferred embodiment, yeast cells are useful for protein expression. Vectors of the present invention for use in yeast will typically, but not invariably, contain an origin of replication suitable for use in yeast and a selectable marker that is functional in yeast. Yeast vectors include Yeast Integrating plasmids (e.g., YIp5) and Yeast Replicating plasmids (the YRp and YEp series plasmids), Yeast Centromere plasmids (the YCp series plasmids), Yeast Artificial Chromosomes (YACs) which are based on yeast linear plasmids, denoted YLp, pGPD-2, 2μ plasmids and derivatives thereof, and improved shuttle vectors such as those described in Gietz et al., Genze, 74: 527-34 (1988) (YIplac, YEplac and YCplac). Selectable markers in yeast vectors include a variety of auxotrophic markers, the most common of which are (in Saccharomyces cerevisiae) URA3, HIS3, LEU2, TRP1 and LYS2, which complement specific auxotrophic mutations, such as ura3-52, his3-D1, leu2-D1, trp1-D1 and lys2-201.

[0279] Insect cells may be chosen for high efficiency protein expression. Where the host cells are from Spodoptera frugiperda, e.g., Sf9 and Sf21 cell lines, and expresSF™ cells (Protein Sciences Corp., Meriden, Conn., USA), the vector replicative strategy is typically based upon the baculovirus life cycle. Typically, baculovirus transfer vectors are used to replace the wild-type AcMNPV polyhedrin gene with a heterologous gene of interest. Sequences that flank the polyhedrin gene in the wild-type genome are positioned 5′ and 3′ of the expression cassette on the transfer vectors. Following co-transfection with AcMNPV DNA, a homologous recombination event occurs between these sequences resulting in a recombinant virus carrying the gene of interest and the polyhedrin or p10 promoter. Selection can be based upon visual screening for lacZ fusion activity.

[0280] The host cells may also be mammalian cells, which are particularly useful for expression of proteins intended as pharmaceutical agents, and for screening of potential agonists and antagonists of a protein or a physiological pathway. Mammalian vectors intended for autonomous extrachromosomal replication will typically include a viral origin, such as the SV40 origin (for replication in cell lines expressing the large T-antigen, such as COS1 and COS7 cells), the papillomavirus origin, or the EBV origin for long term episomal replication (for use, e.g., in 293-EBNA cells, which constitutively express the EBV EBNA-1 gene product and adenovirus E1A). Vectors intended for integration, and thus replication as part of the mammalian chromosome, can, but need not, include an origin of replication functional in mammalian cells, such as the SV40 origin. Vectors based upon viruses, such as adenovirus, adeno-associated virus, vaccinia virus, and various mammalian retroviruses, will typically replicate according to the viral replicative strategy. Selectable markers for use in mammalian cells include, include but are not limited to, resistance to neomycin (G418), blasticidin, hygromycin and zeocin, and selection based upon the purine salvage pathway using HAT medium.

[0281] Expression in mammalian cells can be achieved using a variety of plasmids, including pSV2, pBC12BI, and p91023, as well as lytic virus vectors (e.g., vaccinia virus, adeno virus, and baculovirus), episomal virus vectors (e.g., bovine papillomavirus), and retroviral vectors (e.g., murine retroviruses). Useful vectors for insect cells include baculoviral vectors and pVL 941.

[0282] Plant cells can also be used for expression, with the vector replicon typically derived from a plant virus (e.g., cauliflower mosaic virus, CaMV; tobacco mosaic virus, TMV) and selectable markers chosen for suitability in plants.

[0283] It is known that codon usage of different host cells may be different. For example, a plant cell and a human cell may exhibit a difference in codon preference for encoding a particular amino acid. As a result, human mRNA may not be efficiently translated in a plant, bacteria or insect host cell. Therefore, another embodiment of this invention is directed to codon optimization. The codons of the nucleic acid molecules of the invention may be modified to resemble, as much as possible, genes naturally contained within the host cell without altering the amino acid sequence encoded by the nucleic acid molecule.

[0284] Any of a wide variety of expression control sequences may be used in these vectors to express the nucleic acid molecules of this invention. Such useful expression control sequences include the expression control sequences associated with structural genes of the foregoing expression vectors. Expression control sequences that control transcription include, e.g., promoters, enhancers and transcription termination sites. Expression control sequences in eukaryotic cells that control post-transcriptional events include splice donor and acceptor sites and sequences that modify the half-life of the transcribed RNA, e.g., sequences that direct poly(A) addition or binding sites for RNA-binding proteins. Expression control sequences that control translation include ribosome binding sites, sequences which direct targeted expression of the polypeptide to or within particular cellular compartments, and sequences in the 5′ and 3′ untranslated regions that modify the rate or efficiency of translation.

[0285] Examples of useful expression control sequences for a prokaryote, e.g., E. coli, will include a promoter, often a phage promoter, such as phage lambda pL promoter, the trc promoter, a hybrid derived from the trp and lac promoters, the bacteriophage T7 promoter (in E. coli cells engineered to express the T7 polymerase), the TAC or TRC system, the major operator and promoter regions of phage lambda, the control regions of fd coat protein, and the araBAD operon. Prokaryotic expression vectors may further include transcription terminators, such as the aspA terminator, and elements that facilitate translation, such as a consensus ribosome binding site and translation termination codon, Schomer et al., Proc. Natl. Acad. Sci. USA 83: 8506-8510 (1986).

[0286] Expression control sequences for yeast cells, typically S. cerevisiae, will include a yeast promoter, such as the CYC1 promoter, the GAL1 promoter, the GAL10 promoter, ADH1 promoter, the promoters of the yeast α-mating system, or the GPD promoter, and will typically have elements that facilitate transcription termination, such as the transcription termination signals from the CYC1 or ADH1 gene.

[0287] Expression vectors useful for expressing proteins in mammalian cells will include a promoter active in mammalian cells. These promoters include, but are not limited to, those derived from mammalian viruses, such as the enhancer-promoter sequences from the immediate early gene of the human cytomegalovirus (CMV), the enhancer-promoter sequences from the Rous sarcoma virus long terminal repeat (PSV LTR), the enhancer-promoter from SV40 and the early and late promoters of adenovirus. Other expression control sequences include the promoter for 3-phosphoglycerate kinase or other glycolytic enzymes, the promoters of acid phosphatase. Other expression control sequences include those from the gene comprising the CaSNA of interest. Often, expression is, enhanced by incorporation of polyadenylation sites, such as the late SV40 polyadenylation site and the polyadenylation signal and transcription termination sequences from the bovine growth hormone (BGH) gene, and ribosome binding sites. Furthermore, vectors can include introns, such as intron II of rabbit β-globin gene and the SV40 splice elements.

[0288] Preferred nucleic acid vectors also include a selectable or amplifiable marker gene and means for amplifying the copy number of the gene of interest. Such marker genes are well known in the art. Nucleic acid vectors may also comprise stabilizing sequences (e.g., ori- or ARS-like sequences and telomere-like sequences), or may alternatively be designed to favor directed or non-directed integration into the host cell genome. In a preferred embodiment, nucleic acid sequences of this invention are inserted in frame into an expression vector that allows a high level expression of an RNA which encodes a protein comprising the encoded nucleic acid sequence of interest. Nucleic acid cloning and sequencing methods are well known to those of skill in the art and are described in an assortment of laboratory manuals, including Sambrook (1989), supra, Sambrook (2000), supra; and Ausubel (1992), supra, Ausubel (1999), supra. Product information from manufacturers of biological, chemical and immunological reagents also provide useful information.

[0289] Expression vectors may be either constitutive or inducible. Inducible vectors include either naturally inducible promoters, such as the trc promoter, which is regulated by the lac operon, and the pL promoter, which is regulated by tryptophan, the MMTV-LTR promoter, which is inducible by dexamethasone, or can contain synthetic promoters and/or additional elements that confer inducible control on adjacent promoters. Examples of inducible synthetic promoters are the hybrid Plac/ara-1 promoter and the PLtetO-1 promoter. The PLtetO-1 promoter takes advantage of the high expression levels from the PL promoter of phage lambda, but replaces the lambda repressor sites with two copies of operator 2 of the Tn10 tetracycline resistance operon, causing this promoter to be tightly repressed by the Tet repressor protein and induced in response to tetracycline (Tc) and Tc derivatives such as anhydrotetracycline. Vectors may also be inducible because they contain hormone response elements, such as the glucocorticoid response element (GRE) and the estrogen response element (ERE), which can confer hormone inducibility where vectors are used for expression in cells having the respective hormone receptors. To reduce background levels of expression, elements responsive to ecdysone, an insect hormone, can be used instead, with coexpression of the ecdysone receptor.

[0290] In one embodiment of the invention, expression vectors can be designed to fuse the expressed polypeptide to small protein tags that facilitate purification and/or visualization. Such tags include a polyhistidine tag that facilitates purification of the fusion protein by immobilized metal affinity chromatography, for example using NiNTA resin (Qiagen Inc., Valencia, Calif., USA) or TALON™ resin (cobalt immobilized affinity chromatography medium, Clontech Labs, Palo Alto, Calif., USA). The fusion protein can include a chitin-binding tag and self-excising intein, permitting chitin-based purification with self-removal of the fused tag (IPACT™ system, New England Biolabs, Inc., Beverley, Mass., USA). Alternatively, the fusion protein can include a calmodulin-binding peptide tag, permitting purification by calmodulin affinity resin (Stratagene, La Jolla, Calif., USA), or a specifically excisable fragment of the biotin carboxylase carrier protein, permitting purification of in vivo biotinylated protein using an avidin resin and subsequent tag removal (Promega, Madison, Wis., USA). As another useful alternative, the polypeptides of the present invention can be expressed as a fusion to glutathione-S-transferase, the affinity and specificity of binding to glutathione permitting purification using glutathione affinity resins, such as Glutathione-Superflow Resin (Clontech Laboratories, Palo Alto, Calif., USA), with subsequent elution with free glutathione. Other tags include, for example, the Xpress epitope, detectable by anti-Xpress antibody (Invitrogen, Carlsbad, Calif., USA), a myc tag, detectable by anti-myc tag antibody, the V5 epitope, detectable by anti-V5 antibody (Invitrogen, Carlsbad, Calif., USA), FLAGS epitope, detectable by anti-FLAG® antibody (Stratagene, La Jolla, Calif., USA), and the HA epitope, detectable by anti-HA antibody.

[0291] For secretion of expressed polypeptides, vectors can include appropriate sequences that encode secretion signals, such as leader peptides. For example, the pSecTag2 vectors (Invitrogen, Carlsbad, Calif., USA) are 5.2 kb mammalian expression vectors that carry the secretion signal from the V-J2-C region of the mouse Ig kappa-chain for efficient secretion of recombinant proteins from a variety of mammalian cell lines.

[0292] Expression vectors can also be designed to fuse proteins encoded by the heterologous nucleic acid insert to polypeptides that are larger than purification and/or identification tags. Useful protein fusions include those that permit display of the encoded protein on the surface of a phage or cell, fusions to intrinsically fluorescent proteins, such as those that have a green fluorescent protein (GFP)-like chromophore, fusions to the IgG Fc region, and fusions for use in two hybrid systems.

[0293] Vectors for phage display fuse the encoded polypeptide to, e.g., the gene m protein (pIII) or gene VIII protein (pVIII) for display on the surface of filamentous phage, such as M13. See Barbas et al., Phage Display: A Laboratory Manual, Cold Spring Harbor Laboratory Press (2001); Kay et al. (eds.), Phage Display of Peptides and Proteins: A Laboratory Manual, Academic Press, Inc., (1996); Abelson et al. (eds.), Combinatorial Chemistry (Methods in Enzymology, Vol. 267) Academic Press (1996). Vectors for yeast display, e.g. the pYD1 yeast display vector (Invitrogen, Carlsbad, Calif., USA), use the α-agglutinin yeast adhesion receptor to display recombinant protein on the surface of S. cerevisiae. Vectors for mammalian display, e.g., the pDisplay™ vector (Invitrogen, Carlsbad, Calif., USA), target recombinant proteins using an N-terminal cell surface targeting signal and a C-terminal transmembrane anchoring domain of platelet derived growth factor receptor.

[0294] A wide variety of vectors now exist that fuse proteins encoded by heterologous nucleic acids to the chromophore of the substrate-independent, intrinsically fluorescent green fluorescent protein from Aequorea victoria (“GFP”) and its variants. The GFP-like chromophore can be selected from GFP-like chromophores found in naturally occurring proteins, such as A. victoria GFP (GenBank accession number AAA27721), Renilla reniformis GFP, FP583 (GenBank accession no. AF168419) (DsRed), FP593 (AF272711), FP483 (AF168420), FP484 (AF168424), FP595 (AF246709), FP486 (AF168421), FP538 (AF168423), and FP506 (AF168422), and need include only so much of the native protein as is needed to retain the chromophore's intrinsic fluorescence. Methods for determining the minimal domain required for fluorescence are known in the art. See Li et al., J. Biol. Chem. 272: 28545-28549 (1997). Alternatively, the GFP-like chromophore can be selected from GFP-like chromophores modified from those found in nature. The methods for engineering such modified GFP-like chromophores and testing them for fluorescence activity, both alone and as part of protein fusions, are well known in the art. See Heim et al., Curr. Biol. 6: 178-182 (1996) and Palm et al., Methods Enzymol. 302: 378-394 (1999). A variety of such modified chromophores are now commercially available and can readily be used in the fusion proteins of the present invention. These include EGFP (“enhanced GFP”), EBFP (“enhanced blue fluorescent protein”), BFP2, EYFP (“enhanced yellow fluorescent protein”), ECFP (“enhanced cyan fluorescent protein”) or Citrine. EGFP (see, e.g, Cormack et al., Gene 173: 33-38 (1996); U.S. Pat. Nos. 6,090,919 and 5,804,387, the disclosures of which are incorporated herein by reference in their entireties) is found on a variety of vectors, both plasmid and viral, which are available commercially (Clontech Labs, Palo Alto, Calif., USA); EBFP is optimized for expression in mammalian cells whereas BFP2, which retains the original jellyfish codons, can be expressed in bacteria (see, e.g., Heim et al., Curr. Biol. 6: 178-182 (1996) and Cormack et al., Gene 173: 33-38 (1996)). Vectors containing these blue-shifted variants are available from Clontech Labs (Palo Alto, Calif., USA). Vectors containing EYFP, ECFP (see, e.g., Heim et al., Curr. Biol. 6: 178-182 (1996); Miyawaki et al., Nature 388: 882-887 (1997)) and Citrine (see, e.g., Heikal et al., Proc. Natl. Acad. Sci. USA 97: 11996-12001 (2000)) are also available from Clontech Labs. The GFP-like chromophore can also be drawn from other modified GFPs, including those described in U.S. Pat. Nos. 6,124,128; 6,096,865; 6,090,919; 6,066,476; 6,054,321; 6,027,881; 5,968,750; 5,874,304; 5,804,387; 5,777,079; 5,741,668; and 5,625,048, the disclosures of which are incorporated herein by reference in their entireties. See also Conn (ed.), Green Fluorescent Protein (Methods in Enzymology, Vol. 302), Academic Press, Inc. (1999); Yang, et al., J Biol Chem, 273: 8212-6 (1998); Bevis et al., Nature Biotechnology, 20:83-7 (2002). The GFP-like chromophore of each of these GFP variants can usefully be included in the fusion proteins of the present invention.

[0295] Fusions to the IgG Fc region increase serum half-life of protein pharmaceutical products through interaction with the FcRn receptor (also denominated the FcRp receptor and the Brambell receptor, FcRb), further described in International Patent Application nos. WO 97/43316, WO 97/34631, WO 96/32478, WO 96/18412, the disclosures of which are incorporated herein by reference in their entireties.

[0296] For long-term, high-yield recombinant production of the polypeptides of the present invention, stable expression is preferred. Stable expression is readily achieved by integration into the host cell genome of vectors having selectable markers, followed by selection of these integrants. Vectors such as pUB6/V5-His A, B, and C (Invitrogen, Carlsbad, Calif., USA) are designed for high-level stable expression of heterologous proteins in a wide range of mammalian tissue types and cell lines. pUB6/V5-His uses the promoter/enhancer sequence from the human ubiquitin C gene to drive expression of recombinant proteins: expression levels in 293, CHO, and NIH3T3 cells are comparable to levels from the CMV and human EF-1a promoters. The bsd gene permits rapid selection of stably transfected mammalian cells with the potent antibiotic blasticidin.

[0297] Replication incompetent retroviral vectors, typically derived from Moloney murine leukemia virus, also are useful for creating stable transfectants having integrated provirus. The highly efficient transduction machinery of retroviruses, coupled with the availability of a variety of packaging cell lines such as RetroPack™ PT 67, EcoPack2™-293, AmphoPack-293, and GP2-293 cell lines (all available from Clontech Laboratories, Palo Alto, Calif., USA) allow a wide host range to be infected with high efficiency; varying the multiplicity of infection readily adjusts the copy number of the integrated provirus.

[0298] Of course, not all vectors and expression control sequences will function equally well to express the nucleic acid molecules of this invention. Neither will all hosts function equally well with the same expression system. However, one of skill in the art may make a selection among these vectors, expression control sequences and hosts without undue experimentation and without departing from the scope of this invention. For example, in selecting a vector, the host must be considered because the vector must be replicated in it. The vector's copy number, the ability to control that copy number, the ability to control integration, if any, and the expression of any other proteins encoded by the vector, such as antibiotic or other selection markers, should also be considered. The present invention further includes host cells comprising the vectors of the present invention, either present episomally within the cell or integrated, in whole or in part, into the host cell chromosome. Among other considerations, some of which are described above, a host cell strain may be chosen for its ability to process the expressed polypeptide in the desired fashion. Such post-translational modifications of the polypeptide include, but are not limited to, acetylation, carboxylation, glycosylation, phosphorylation, lipidation, and acylation, and it is an aspect of the present invention to provide CaSPs with such post-translational modifications.

[0299] In selecting an expression control sequence, a variety of factors should also be considered. These include, for example, the relative strength of the sequence, its controllability, and its compatibility with the nucleic acid molecules of this invention, particularly with regard to potential secondary structures. Unicellular hosts should be selected by consideration of their compatibility with the chosen vector, the toxicity of the product coded for by the nucleic acid sequences of this invention, their secretion characteristics, their ability to fold the polypeptide correctly, their fermentation or culture requirements, and the ease of purification from them of the products coded for by the nucleic acid molecules of this invention.

[0300] The recombinant nucleic acid molecules and more particularly, the expression vectors of this invention may be used to express the polypeptides of this invention as recombinant polypeptides in a heterologous host cell. The polypeptides of this invention may be full-length or less than full-length polypeptide fragments recombinantly expressed from the nucleic acid molecules according to this invention. Such polypeptides include analogs, derivatives and muteins that may or may not have biological activity.

[0301] Vectors of the present invention will also often include elements that permit in vitro transcription of RNA from the inserted heterologous nucleic acid. Such vectors typically include a phage promoter, such as that from T7, T3, or SP6, flanking the nucleic acid insert. Often two different such promoters flank the inserted nucleic acid, permitting separate in vitro production of both sense and antisense strands.

[0302] Transformation and other methods of introducing nucleic acids into a host cell (e.g., conjugation, protoplast transformation or fusion, transfection, electroporation, liposome delivery, membrane fusion techniques, high velocity DNA-coated pellets, viral infection and protoplast fusion) can be accomplished by a variety of methods which are well known in the art (See, for instance, Ausubel, supra, and Sambrook et al., supra). Bacterial, yeast, plant or mammalian cells are transformed or transfected with an expression vector, such as a plasmid, a cosmid, or the like, wherein the expression vector comprises the nucleic acid of interest. Alternatively, the cells may be infected by a viral expression vector comprising the nucleic acid of interest. Depending upon the host cell, vector, and method of transformation used, transient or stable expression of the polypeptide will be constitutive or inducible. One having ordinary skill in the art will be able to decide whether to express a polypeptide transiently or stably, and whether to express the protein constitutively or inducibly.

[0303] A wide variety of unicellular host cells are useful in expressing the DNA sequences of this invention. These hosts may include well known eukaryotic and prokaryotic hosts, such as strains of, fungi, yeast, insect cells such as Spodoptera frugiperda (SF9), animal cells such as CHO, as well as plant cells in tissue culture. Representative examples of appropriate host cells include, but are not limited to, bacterial cells, such as E. coli, Caulobacter crescentus, Streptomyces species, and Salmonella typhimurium; yeast cells, such as Saccharomyces cerevisiae, Schizosaccharomyces pombe, Pichia pastoris, Pichia methanolica; insect cell lines, such as those from Spodoptera frugiperda—e.g., Sf9 and Sf21 cell lines, and expresSF™ cells (Protein Sciences Corp., Meriden, Conn., USA)—Drosophila S2 cells, and Trichoplusia ni High Five® Cells (Invitrogen, Carlsbad, Calif., USA); and mammalian cells. Typical mammalian cells include BHK cells, BSC 1 cells, BSC 40 cells, BMT 10 cells, VERO cells, COS1 cells, COS7 cells, Chinese hamster ovary (CHO) cells, 3T3 cells, NIH 3T3 cells, 293 cells, HEPG2 cells, HeLa cells, L cells, MDCK cells, HEK293 cells, WI38 cells, murine ES cell lines (e.g., from strains 129/SV, C57/BL6, DBA-1, 129/SVJ), K562 cells, Jurkat cells, and BW5147 cells. Other mammalian cell lines are well known and readily available from the American Type Culture Collection (ATCC) (Manassas, Va., USA) and the National Institute of General Medical Sciences (NIGMS) Human Genetic Cell Repository at the Coriell Cell Repositories (Camden, N.J., USA). Cells or cell lines derived from breast, colon, lung, ovarian or prostate tissue are particularly preferred because they may provide a more native post-translational processing. Particularly preferred are human breast, colon, lung, ovarian or prostate cells or human breast, colon, lung, ovarian or prostate cancer cells.

[0304] Particular details of the transfection, expression and purification of recombinant proteins are well documented and are understood by those of skill in the art. Further details on the various technical aspects of each of the steps used in recombinant production of foreign genes in bacterial cell expression systems can be found in a number of texts and laboratory manuals in the art. See, e.g., Ausubel (1992), supra, Ausubel (1999), supra, Sambrook (1989), supra, and Sambrook (2001), supra.

[0305] Methods for introducing the vectors and nucleic acid molecules of the present invention into the host cells are well known in the art; the choice of technique will depend primarily upon the specific vector to be introduced and the host cell chosen.

[0306] Nucleic acid molecules and vectors may be introduced into prokaryotes, such as E. coli, in a number of ways. For instance, phage lambda vectors will typically be packaged using a packaging extract (e.g., Gigapack® packaging extract, Stratagene, La Jolla, Calif., USA), and the packaged virus used to infect E. coli.

[0307] Plasmid vectors will typically be introduced into chemically competent or electrocompetent bacterial cells. E. coli cells can be rendered chemically competent by treatment, e.g., with CaCl₂, or a solution of Mg²⁺, Mn²⁺, Ca⁺, Rb⁺ or K⁺, dimethyl sulfoxide, dithiothreitol, and hexamine cobalt (III), Hanahan, J. Mol. Biol. 166(4):557-8(1 (1983), and vectors introduced by heat shock. A wide variety of chemically competent strains are also available commercially (e.g., Epicurian Coli® XL10-Gold® Ultracompetent Cells (Stratagene, La Jolla, Calif., USA); DH5α competent cells (Clontech Laboratories, Palo Alto, Calif., USA); and TOP10 Chemically Competent E. coli Kit (Invitrogen, Carlsbad, Calif., USA)). Bacterial cells can be rendered electrocompetent to take up exogenous DNA by electroporation by various pre-pulse treatments; vectors are introduced by electroporation followed by subsequent outgrowth in selected media. An extensive series of protocols is provided by BioRad (Richmond, Calif., USA).

[0308] Vectors can be introduced into yeast cells by spheroplasting, treatment with lithium salts, electroporation, or protoplast fusion. Spheroplasts are prepared by the action of hydrolytic enzymes such as a snail-gut extract, usually denoted Glusulase or Zymolyase, or an enzyme from Arthrobacter luteus to remove portions of the cell wall in the presence of osmotic stabilizers, typically 1 M sorbitol. DNA is added to the spheroplasts, and the mixture is co-precipitated with a solution of polyethylene glycol (PEG) and Ca²⁺. Subsequently, the cells are resuspended in a solution of sorbitol, mixed with molten agar and then layered on the surface of a selective plate containing sorbitol.

[0309] For lithium-mediated transformation, yeast cells are treated with lithium acetate to permeabilize the cell wall, DNA is added and the cells are co-precipitated with PEG. The cells are exposed to a brief heat shock, washed free of PEG and lithium acetate, and subsequently spread on plates containing ordinary selective medium. Increased frequencies of transformation are obtained by using specially-prepared single-stranded carrier DNA and certain organic solvents. Schiestl et al., Curr. Genet. 16(5-6): 339-46 (1989).

[0310] For electroporation, freshly-grown yeast cultures are typically washed, suspended in an osmotic protectant, such as sorbitol, mixed with DNA, and the cell suspension pulsed in an electroporation device. Subsequently, the cells are spread on the surface of plates containing selective media. Becker et al., Methods Enzymol. 194: 182-187 (1991). The efficiency of transformation by electroporation can be increased over 100-fold by using PEG, single-stranded carrier DNA and cells that are in late log-phase of growth. Larger constructs, such as YACs, can be introduced by protoplast fusion.

[0311] Mammalian and insect cells can be directly infected by packaged viral vectors, or transfected by chemical or electrical means. For chemical-transfection, DNA can be coprecipitated with CaPO₄ or introduced using liposomal and nonliposomal lipid-based agents. Commercial kits are available for CaPO₄ transfection (CalPhos™ Mammalian Transfection Kit, Clontech Laboratories, Palo Alto, Calif., USA), and lipid-mediated transfection can be practiced using commercial reagents, such as LIPOFECTAMINE™ 2000, LIPOFECTAMINE™ Reagent, CELLFECTIN® Reagent, and LIPOFECTIN® Reagent (Invitrogen, Carlsbad, Calif., USA), DOTAP Liposomal Transfection Reagent, FuGENE 6, X-tremeGENE Q2, DOSPER, (Roche Molecular Biochemicals, Indianapolis, Ind. USA), Effectene™, PolyFect®, Superfect® (Qiagen, Inc., Valencia, Calif., USA). Protocols for electroporating mammalian cells can be found in, for example, Norton et al. (eds.), Gene Transfer Methods: Introducing DNA into Living Cells and Organisms, BioTechniques Books, Eaton Publishing Co. (2000). Other transfection techniques include transfection by particle bombardment and microinjection. See, e.g., Cheng et al., Proc. Natl. Acad. Sci. USA 90(10): 4455-9 (1993); Yang et al., Proc. Natl. Acad. Sci. USA 87(24): 9568-72 (1990).

[0312] Production of the recombinantly produced proteins of the present invention can optionally be followed by purification.

[0313] Purification of recombinantly expressed proteins is now well within the skill in the art and thus need not be detailed here. See, e.g., Thorner et al. (eds.), Applications of Chimeric Genes and Hybrid Proteins, Part A: Gene Expression and Protein Purification (Methods in Enzymology, Vol. 326), Academic Press (2000); Harbin (ed.), Cloning, Gene Expression and Protein Purification: Experimental Procedures and Process Rationale, Oxford Univ. Press (2001); Marshak et al., Strategies for Protein Purification and Characterization: A Laboratory Course Manual, Cold Spring Harbor Laboratory Press (1996); and Roe (ed.), Protein Purification Applications, Oxford University Press (2001).

[0314] Briefly, however, if purification tags have been fused through use of an expression vector that appends such tag, purification can be effected, at least in part, by means appropriate to the tag, such as use of immobilized metal affinity chromatography for polyhistidine tags. Other techniques common in the art include ammonium sulfate fractionation, immunoprecipitation, fast protein liquid chromatography (FPLC), high performance liquid chromatography (IPLC), and preparative gel electrophoresis.

Polypeptides, including Fragments Muteins, Homologous Proteins, Allelic Variants, Analogs and Derivatives

[0315] Another aspect of the invention relates to polypeptides encoded by the nucleic acid molecules described herein. In a preferred embodiment, the polypeptide is a cancer specific polypeptide (CaSP). In an even more preferred embodiment, the polypeptide comprises an amino acid sequence of SEQ ID NO:142-361 or is derived from a polypeptide having the amino acid sequence of SEQ ID NO: 142-361. A polypeptide as defined herein may be produced recombinantly, as discussed supra, may be isolated from a cell that naturally expresses the protein, or may be chemically synthesized following the teachings of the specification and using methods well known to those having ordinary skill in the art.

[0316] Polypeptides of the present invention may also comprise a part or fragment of a CaSP. In a preferred embodiment, the fragment is derived from a polypeptide having an amino acid sequence selected from the group consisting of SEQ ID NO: 142-361. Polypeptides of the present invention comprising a part or fragment of an entire CaSP may or may not be CaSPs. For example, a full-length polypeptide may be cancer-specific, while a fragment thereof may be found in normal breast, colon, lung, ovarian or prostate tissues as well as in breast, colon, lung, ovarian or prostate cancer. A polypeptide that is not a CaSP, whether it is a fragment, analog, mutein, homologous protein or derivative, is nevertheless useful, especially for immunizing animals to prepare anti-CaSP antibodies.

[0317] In a preferred embodiment, the part or fragment is a CaSP. Methods of determining whether a polypeptide of the present invention is a CaSP are described infra. Polypeptides of the present invention comprising fragments of at least 6 contiguous amino acids are also useful in mapping B cell and T cell epitopes of the reference protein. See, e.g., Geysen et al., Proc. Natl. Acad. Sci. USA 81: 3998-4002 (1984) and U.S. Pat. Nos. 4,708,871 and 5,595,915, the disclosures of which are incorporated herein by reference in their entireties. Because the fragment need not itself be immunogenic, part of an immunodominant epitope, nor even recognized by native antibody, to be useful in such epitope mapping, all fragments of at least 6 amino acids of a polypeptide of the present invention have utility in such a study.

[0318] Polypeptides of the present invention comprising fragments of at least 8 contiguous amino acids, often at least 15 contiguous amino acids, are useful as immunogens for raising antibodies that recognize polypeptides of the present invention. See, e.g., Lerner, Nature 299: 592-596 (1982); Shinnick et al., Annu. Rev. Microbiol. 37: 425-46 (1983); Sutcliffe et al., Science 219-660-6 (1983). A further described the above-cited references, virtually all 8-mers, conjugated to a carrier, such as a protein, prove immunogenic and are capable of eliciting antibody for the conjugated peptide; accordingly, all fragments of at least 8 amino acids of the polypeptides of the present invention have utility as immunogens.

[0319] Polypeptides comprising fragments of at least 8, 9, 10 or 12 contiguous amino acids are also useful as competitive inhibitors of binding of the entire polypeptide, or a portion thereof, to antibodies (as in epitope mapping), and to natural binding partners, such as subunits in a multimeric complex or to receptors or ligands of the subject protein; this competitive inhibition permits identification and separation of molecules that bind specifically to the polypeptide of interest. See U.S. Pat. Nos. 5,539,084 and 5,783,674, incorporated herein by reference in their entireties.

[0320] The polypeptide of the present invention thus preferably is at least 6 amino acids in length, typically at least 8, 9, 10 or 12 amino acids in length, and often at least 15 amino acids in length. Often, the polypeptide of the present invention is at least 20 amino acids in length, even 25 amino acids, 30 amino acids, 35 amino acids, or 50 amino acids or more in length. Of course, larger polypeptides having at least 75 amino acids, 100 amino acids, or even 150 amino acids are also useful, and at times preferred.

[0321] One having ordinary skill in the art can produce fragments by truncating the nucleic acid molecule, e.g., a CaSNA, encoding the polypeptide and then expressing it recombinantly. Alternatively, one can produce a fragment by chemically synthesizing a portion of the full-length polypeptide. One may also produce a fragment by enzymatically cleaving either a recombinant polypeptide or an isolated naturally occurring polypeptide. Methods of producing polypeptide fragments are well known in the art. See, e.g., Sambrook (1989), supra; Sambrook (2001), supra; Ausubel (1992), supra; and Ausubel (1999), supra. In one embodiment, a polypeptide comprising only a fragment, preferably a fragment of a CaSP, may be produced by chemical or enzymatic cleavage of a CaSP polypeptide. In a preferred embodiment, a polypeptide fragment is produced by expressing a nucleic acid molecule of the present invention encoding a fragment, preferably of a CaSP, in a host cell.

[0322] Polypeptides of the present invention are also inclusive of mutants, fusion proteins, homologous proteins and allelic variants.

[0323] A mutant protein, or mutein, may have the same or different properties compared to a naturally occurring polypeptide and comprises at least one amino acid insertion, duplication, deletion, rearrangement or substitution compared to the amino acid sequence of a native polypeptide. Small deletions and insertions can often be found that do not alter the function of a protein. Muteins may or may not be cancer-specific. Preferably, the mutein is cancer-specific. More preferably the mutein is specific for breast, colon, lung, ovarian or prostate cancer. Even more preferably the mutein is a polypeptide that comprises at least one amino acid insertion, duplication, deletion, rearrangement or substitution compared to the amino acid sequence of SEQ ID NO: 142-361. Accordingly, in a preferred embodiment, the mutein is one that exhibits at least 50% sequence identity, more preferably at least 60% sequence identity, even more preferably at least 70%, yet more preferably at least 80% sequence identity to a CaSP comprising an amino acid sequence of SEQ ID NO: 142-361. In a yet more preferred embodiment, the mutein exhibits at least 85%, more preferably 90%, even more preferably 95% or 96%, and yet more preferably at least 97%, 98%, 99% or 99.5% sequence identity to a CaSP comprising an amino acid sequence of SEQ ID NO: 142-361.

[0324] A mutein may be produced by isolation from a naturally occurring mutant cell, tissue or organism. A mutein may be produced by isolation from a cell, tissue or organism that has been experimentally mutagenized. Alternatively, a mutein may be produced by chemical manipulation of a polypeptide, such as by altering the amino acid residue to another amino acid residue using synthetic or semi-synthetic chemical techniques. In a preferred embodiment, a mutein is produced from a host cell comprising a mutated nucleic acid molecule compared to the naturally occurring nucleic acid molecule. For instance, one may produce a mutein of a polypeptide by introducing one or more mutations into a nucleic acid molecule of the invention and then expressing it recombinantly. These mutations may be targeted, in which particular encoded amino acids are altered, or may be untargeted, in which random encoded amino acids within the polypeptide are altered. Muteins with random amino acid alterations can be screened for a particular biological activity or property, particularly whether the polypeptide is cancer-specific, as described below. Multiple random mutations can be introduced into the gene by methods well known to the art, e.g., by error-prone PCR, shuffling, oligonucleotide-directed mutagenesis, assembly PCR, sexual PCR mutagenesis, in vivo mutagenesis, cassette mutagenesis, recursive ensemble mutagenesis, exponential ensemble mutagenesis and site-specific mutagenesis. Methods of producing muteins with targeted or random amino acid alterations are well known in the art. See, e.g., Sambrook (1989), supra; Sambrook (2001), supra; Ausubel (1992), supra; and Ausubel (1999), as well as U.S. Pat. No. 5,223,408, which is herein incorporated by reference in its entirety.

[0325] The invention also contemplates polypeptides that are homologous to a polypeptide of the invention. In a preferred embodiment, the polypeptide is homologous to a CaSP. In an even more preferred embodiment, the polypeptide is homologous to a CaSP selected from the group having an amino acid sequence of SEQ ID NO: 142-361. By homologous polypeptide it is means one that exhibits significant sequence identity to a CaSP, preferably a CaSP having an amino acid sequence of SEQ ID NO: 142-361. By significant sequence identity it is meant that the homologous polypeptide exhibits at least 50% sequence identity, more preferably at least 60% sequence identity, even more preferably at least 70%, yet more preferably at least 80% sequence identity to a CaSP comprising an amino acid sequence of SEQ ID NO: 142-361. More preferred are homologous polypeptides exhibiting at least 85%, more preferably 90%, even more preferably 95% or 96%, and yet more preferably at least 97% or 98% sequence identity to a CaSP comprising an amino acid sequence of SEQ ID NO: 142-361. Most preferably, the homologous polypeptide exhibits at least 99%, more preferably 99.5%, even more preferably 99.6%, 99.7%, 99.8% or 99.9% sequence identity to a CaSP comprising an amino acid sequence of SEQ ID NO: 142-361. In a preferred embodiment, the amino acid substitutions of the homologous polypeptide are conservative amino acid substitutions as discussed above.

[0326] Homologous polypeptides of the present invention also comprise polypeptide encoded by a nucleic acid molecule that selectively hybridizes to a CaSNA or an antisense sequence thereof. In this embodiment, it is preferred that the homologous polypeptide be encoded by a nucleic acid molecule that hybridizes to a CaSNA under low stringency, moderate stringency or high stringency conditions, as defined herein. More preferred is a homologous polypeptide encoded by a nucleic acid sequence which hybridizes to a CaSNA selected from the group consisting of SEQ ID NO: 1-141 or a homologous polypeptide encoded by a nucleic acid molecule that hybridizes to a nucleic acid molecule that encodes a CaSP, preferably an CaSP of SEQ ID NO:142-361 under low stringency, moderate stringency or high stringency conditions, as defined herein.

[0327] Homologous polypeptides of the present invention may be naturally occurring and derived from another species, especially one derived from another primate, such as chimpanzee, gorilla, rhesus macaque, or baboon, wherein the homologous polypeptide comprises an amino acid sequence that exhibits significant sequence identity to that of SEQ ID NO: 142-361. The homologous polypeptide may also be a naturally occurring polypeptide from a human, when the CaSP is a member of a family of polypeptides. The homologous polypeptide may also be a naturally occurring polypeptide derived from a non-primate, mammalian species, including without limitation, domesticated species, e.g., dog, cat, mouse, rat, rabbit, guinea pig, hamster, cow, horse, goat or pig. The homologous polypeptide may also be a naturally occurring polypeptide derived from a non-mammalian species, such as birds or reptiles. The naturally occurring homologous protein may be isolated directly from humans or other species. Alternatively, the nucleic acid molecule encoding the naturally occurring homologous polypeptide may be isolated and used to express the homologous polypeptide recombinantly. The homologous polypeptide may also be one that is experimentally produced by random mutation of a nucleic acid molecule and subsequent expression of the nucleic acid molecule. Alternatively, the homologous polypeptide may be one that is experimentally produced by directed mutation of one or more codons to alter the encoded amino acid of a CaSP. In a preferred embodiment, the homologous polypeptide encodes a polypeptide that is a CaSP.

[0328] Relatedness of proteins can also be characterized using a second functional test, the ability of a first protein competitively to inhibit the binding of a second protein to an antibody. It is, therefore, another aspect of the present invention to provide isolated polpeptide not only identical in sequence to those described with particularity herein, but also to provide isolated polypeptide (“cross-reactive proteins”) that competitively inhibit the binding of antibodies to all or to a portion of various of the isolated polypeptides of the present invention. Such competitive inhibition can readily be determined using immunoassays well known in the art.

[0329] As discussed above, single nucleotide polymorphisms (SNPs) occur frequently in eukaryotic genomes, and the sequence determined from one individual of a species may differ from other allelic forms present within the population. Thus, polypeptides of the present invention are also inclusive of those encoded by an allelic variant of a nucleic acid molecule encoding a CaSP. In this embodiment, it is preferred that the polypeptide be encoded by an allelic variant of a gene that encodes a polypeptide having the amino acid sequence selected from the group consisting of SEQ ID NO: 142-361. More preferred is that the polypeptide be encoded by an allelic variant of a gene that has the nucleic acid sequence selected from the group consisting of SEQ ID NO: 1-141.

[0330] Polypeptides of the present invention are also inclusive of derivative polypeptides encoded by a nucleic acid molecule according to the instant invention. In this embodiment, it is preferred that the polypeptide be a CaSP. Also preferred are derivative polypeptides having an amino acid sequence selected from the group consisting of SEQ ID NO: 142-361 and which has been acetylated, carboxylated, phosphorylated, glycosylated, ubiquitinated or other PTMs. In another preferred embodiment, the derivative has been labeled with, e.g., radioactive isotopes such as ¹²⁵I, ³²P, ³⁵S, and ³H. In another preferred embodiment, the derivative has been labeled with fluorophores, chemiluminescent agents, enzymes, and antiligands that can serve as specific binding pair members for a labeled ligand.

[0331] Polypeptide modifications are well known to those of skill and have been described in great detail in the scientific literature. Several particularly common modifications, glycosylation, lipid attachment, sulfation, gamma-carboxylation of glutamic acid residues, hydroxylation and ADP-ribosylation, for instance, are described in most basic texts, such as, for instance Creighton, Protein Structure and Molecular Properties, 2nd ed., W.H. Freeman and Company (1993). Many detailed reviews are available on this subject, such as, for example, those provided by Wold, in Johnson (ed.), Posttranslational Covalent Modification of Proteins, pgs. 1-12, Academic Press (1983); Seifter et al., Meth. Enzymol. 182: 626-646 (1990) and Rattan et al., Ann. N.Y. Acad. Sci. 663: 48-62 (1992).

[0332] One may determine whether a polypeptide of the invention is likely to be post-translationally modified by analyzing the sequence of the polypeptide to determine if there are peptide motifs indicative of sites for post-translational modification. There are a number of computer programs that permit prediction of post-translational modifications. See, e.g., www.expasy.org (accessed Nov. 11, 2002), which includes PSORT, for prediction of protein sorting signals and localization sites, SignalP, for prediction of signal peptide cleavage sites, MITOPROT and Predotar, for prediction of mitochondrial targeting sequences, NetOGlyc, for prediction of type O-glycosylation sites in mammalian proteins, big-PI Predictor and DGPI, for prediction of prenylation-anchor and cleavage sites, and NetPhos, for prediction of Ser, Thr and Tyr phosphorylation sites in eukaryotic proteins. Other computer programs, such as those included in GCG, also may be used to determine post-translational modification peptide motifs.

[0333] General examples of types of post-translational modifications include, but are not limited to: (Z)-dehydrobutyrine; 1-chondroitin sulfate-L-aspartic acid ester; 1′-glycosyl-L-tryptophan; 1′-phospho-L-histidine; 1-thioglycine, 2′-(S-L-cysteinyl)-L-histidine; 2′-[3-carboxamido (trimethylammonio)propyl]-L-histidine; 2′-alpha-mannosyl-L-tryptophan; 2-methyl-L-glutamine; 2-oxobutanoic acid; 2-pyrrolidone carboxylic acid; 3′-(1′-L-histidyl)-L-tyrosine; 3′-(8alpha-FAD)-L-histidine; 3′-(S-L-cysteinyl)-L-tyrosine; 3′, 3″,5′-triiodo-L-thyronine; 3′-4′-phospho-L-tyrosine; 3-hydroxy-L-proline; 3′-methyl-L-histidine; 3-methyl-L-lanthionine; 3′-phospho-L-histidine; 4′-(L-tryptophan)-L-tryptophyl quinone; 42 N-cysteinyl-glycosylphosphatidylinositolethanolamine; 43-(T-L-histidyl)-L-tyrosine; 4-hydroxy-L-arginine; 4-hydroxy-L-lysine; 4-hydroxy-L-proline; 5′-(N-6-L-lysine)-L-topaquinone; 5-hydroxy-L-lysine; 5-methyl-L-arginine; alpha-1-microglobulin-Ig alpha complex chromophore; bis-L-cysteinyl bis-L-histidino diiron disulfide; bis-L-cysteinyl-L-N3′-histidino-L-serinyl tetrairon' tetrasulfide; chondroitin sulfate D-glucuronyl-D-galactosyl-D-galactosyl-D-xylosyl-L-serine; D-alanine; D-allo-isoleucine; D-asparagine; dehydroalanine; dehydrotyrosine; dermatan 4-sulfate D-glucuronyl-D-galactosyl-D-galactosyl-D-xylosyl-L-serine; D-glucuronyl-N-glycine; dipyrrolylmethanemethyl-L-cysteine; D-leucine; D-methionine; D-phenylalanine; D-serine; D-tryptophan; glycine amide; glycine oxazolecarboxylic acid; glycine thiazolecarboxylic acid; heme P450-bis-L-cysteine-L-tyrosine; heme-bis-L-cysteine; hemediol-L-aspartyl ester-L-glutamyl ester; hemediol-L-aspartyl ester-L-glutamyl ester-L-methionine sulfonium; heme-L-cysteine; heme-L-histidine; heparan sulfate D-glucuronyl-D-galactosyl-D-galactosyl-D-xylosyl-L-serine; heme P450-bis-L-cysteine-L-lysine; hexakis-L-cysteinyl hexairon hexasulfide; keratan sulfate D-glucuronyl-D-galactosyl-D-galactosyl-D-xylosyl-L-threonine; L oxoalanine-lactic acid; L phenyllactic acid; 1′-(8alpha-FAD)-L-histidine; L-2′.4′,5′-topaquinone; L-3′,4′-dihydroxyphenylalanine; L-3′.4′.5′-trihydroxyphenylalanine; L-4′-bromophenylalanine; L-6′-bromotryptophan; L-alanine amide; L-alanyl imidazolinone glycine; L-allysine; L-arginine amide; L-asparagine amide; L-aspartic 4-phosphoric anhydride; L-aspartic acid 1-amide; L-beta-methylthioaspartic acid; L-bromohistidine; L-citrulline; L-cysteine amide; L-cysteine glutathione disulfide; L-cysteine, methyl disulfide; L-cysteine methyl ester; L-cysteine oxazolecarboxylic acid; L-cysteine oxazolinecarboxylic acid; L-cysteine persulfide; L-cysteine sulfenic acid; t-cysteine sulfinic acid; L-cysteine thiazolecarboxylic acid; L-cysteinyl homocitryl molybdenum-heptairon-nonasulfide; L-cysteinyl imidazolinone glycine; L-cysteinyl molybdopterin; L-cysteinyl molybdopterin guanine dinucleotide; L-cystine; L-erythro-beta-hydroxyasparagine; L-erythro-beta-hydroxyaspartic acid; L-gamma-carboxyglutamic acid; L-glutamic acid 1-amide; L-glutamic acid 5-methyl ester; L-glutamine amide; L-glutamyl 5-glycerylphosphorylethanolamine; L-histidine amide; L-isoglutamyl-polyglutamic acid; L-isoglutamyl-polyglycine; L-isoleucine amide; L-lanthionine; L-leucine amide; L-lysine amide; L-lysine thiazolecarboxylic acid; L-lysinoalanine; L-methionine amide; L-methionine sulfone; L-phenyalanine thiazolecarboxylic acid; L-phenylalanine amide; L-proline amide; L-selenocysteine; L-selenocysteinyl molybdopterin guanine dinucleotide; L-serine amide; L-serine thiazolecarboxylic acid; L-seryl imidazolinone glycine; L-T-bromophenylalanine; L-T-bromophenylalanine; L-threonine amide; L-thyroxine; L-tryptophan amide; L-tryptophyl quinone; L-tyrosine amide; L-valine amide; meso-lanthionine; N-(L-glutamyl)-L-tyrosine; N-(L-isoaspartyl)-glycine; N-(L-isoaspartyl)-L-cysteine; N,N,N-trimethyl-L-alanine; N,N-dimethyl-L-proline; N2-acetyl-L-lysine; N2-succinyl-L-tryptophan; N4-(ADP-ribosyl)-L-asparagine; N4-glycosyl-L-asparagine; N4-hydroxymethyl-L-asparagine; N4-methyl-L-asparagine; N5-methyl-L-glutamine; N6-1-carboxyethyl-L-lysine; N6-(4-amino hydroxybutyl)-L-lysine; N6-(L-isoglutamyl)-L-lysine; N6-(phospho-5′-adenosine)-L-lysine; N6-(phospho-5′-guanosine)-L-tysine; N6,N6,N6-trimethyl-L-lysine; N6,N6-dimethyl-L-lysine; N6-acetyl-L-lysine; N6-biotinyl-L-lysine; N6-carboxy-L-lysine; N6-formyl-L-lysine; N6-glycyl-L-lysine; N6-lipoyl-L-lysine; N6-methyl-L-lysine; N6-methyl-N-6-poly(N-methyl-propylamine)-L-lysine; N6-mureinyl-L-lysine; N6-myristoyl-L-lysine; N6-palmitoyl-L-lysine; N6-pyridoxal phosphate-L-lysine; N6-pyruvic acid 2-iminyl-L-lysine; N6-retinal-L-lysine; N-acetylglycine; N-acetyl-L-glutamine; N-acetyl-L-alanine; N-acetyl-L-aspartic acid; N-acetyl-L-cysteine; N-acetyl-L-glutamic acid; N-acetyl-L-isoleucine; N-acetyl-L-methionine; N-acetyl-L-proline; N-acetyl-L-serine; N-acetyl-L-threonine; N-acetyl-L-tyrosine; N-acetyl-L-valine; N-alanyl-glycosylphosphatidylinositolethanolamine; N-asparaginyl-glycosylphosphatidylinositolethanolamine; N-aspartyl-glycosylphosphatidylinositolethanolamine; N-formylglycine; N-formyl-L-methionine; N-glycyl-glycosylphosphatidylinositolethanolamine; N-L-glutamyl-poly-L-glutamic acid; N-methylglycine; N-methyl-L-alanine; N-methyl:L-methionine; N-methyl-L-phenylalanine; N-myristoyl-glycine; N-palmitoyl-L-cysteine; N-pyruvic acid 2-iminyl-L-cysteine; N-pyruvic acid 2-iminyl-L-valine; N-seryl-glycosylphosphatidylinositolethanolamine; N-seryl-glycosyCaSPhingoipidinositolethlanoiamine; O-(ADP-ribosyl)-L-serine; O-(phospho-5′-adenosine)-L-threonine; 0-(phospho-5′-DNA)-L-serine; 0-(phospho-5′-DNA)-L-threonine; O-(phospho-5′rRNA)-L-serine; O-(phosphoribosyl dephospho-coenzyme A)-L-serine; O-(sn-1-glycerophosphoryl)-L-serine; O4′-(8alpha-FAD)-L-tyrosine; O4′-(phospho-5′-adenosine)-L-tyrosine; O4′-(phospho-5′-DNA)-L-tyrosine; O4′-(phospho-5′-RNA)-L-tyrosine; O4′-(phospho-5′-uridine)-L-tyrosine; O4-glycosyl-L-hydroxyproline; O4′-glycosyl-L-tyrosine; O4′-sulfo-L-tyrosine; 05-glycosyl-L-hydroxylysine; O-glycosyl-L-serine; O-glycosyl-L-threonine; omega-N-(ADP-ribosyl)-L-arginine; omega-N-omega-N′-dimethyl-L-arginine; omega-N-methyl-L-arginine; omega-N-omega-N-dimethyl-L-arginine; omega-N-phospho-L-arginine; O'octanoyl-L-serine; O-palmitoyl-L-serine; O-palmitoyl-L-threonine; O-phospho-L-serine; O-phospho-L-threonine; O-phosphopantetheine-L-serine; phycoerythrobilin-bis-L-cysteine; phycourobilin-bis-L-cysteine; pyrroloquinoline quinone; pyruvic acid; S hydroxycinnamyl-L-cysteine; S-(2-aminovinyl) methyl-D-eysteine; S-(2-aminovinyl)-D-cysteine; S-(6-FW-L-cysteine; S-(8alpha-FAD)-L-cysteine; S-(ADP-ribosyl)-L-cysteine; S-(L-isoglutamyl)-L-cysteine; S-12-hydroxyfarnesyl-L-cysteine; S-acetyl-L-cysteine; S-diacylglycerol-L-cysteine; S-diphytanylglycerot diether-L-cysteine; S-farnesyl-L-cysteine; S-geranylgeranyl-L-cysteine; S-glycosyl-L-cysteine; S-glycyl-L-cysteine; S-methyl-L-cysteine; S-nitrosyl-L-cysteine; S-palmitoyl-L-cysteine; S-phospho-L-cysteine; S-phycobiliviolin-L-cysteine; S-phycocyanobilin-L-cysteine; S-phycoerythrobilin-L-cysteine; S-phytochromobilin-L-cysteine; S-selenyl-L-cysteine; S-sulfo-L-cysteine; tetrakis-L-cysteinyl diiron disulfide; tetrakis-L-cysteinyl iron; tetrakis-L-cysteinyl tetrairon tetrasulfide; trans-2,3-cis 4-dihydroxy-L-proline; tris-L-cysteinyl triiron tetrasulfide; tris-L-cysteinyl truron trisulfide; tris-L-cysteinyl-L-aspartato tetrairon tetrasulfide; tris-L-cysteinyl-L-cysteine persulfido-bis-L-glutamato-L-histidino tetrairon disulfide trioxide; tris-L-cysteinyl-L-N3′-histidino tetrairon tetrasulfide; tris-L-cysteinyl-L-N1′-histidino tetrairon tetrasulfide; and tris-L-cysteinyl-L-serinyl tetrairon tetrasulfide.

[0334] Additional examples of PTMs may be found in web sites such as the Delta Mass database based on Krishna, R. G. and F. Wold (1998). Posttranslational Modifications. Proteins—Analysis and Design. R. H. Angeletti. San Diego, Academic Press. 1: 121-206. Methods in Enzymology, 193, J. A. McClosky (ed) (1990), pages 647-660; Methods in Protein Sequence Analysis edited by Kazutomo Imahori and Fumio Sakiyama, Plenum Press, (1993) “Post-translational modifications of proteins” R. G. Krishna and F. Wold pages 167-172; “GlycoSuiteDB: a new curated relational database of glycoprotein glycan structures and their biological sources” Cooper et al. Nucleic Acids Res. 29: 332-335 (2001) “O-GLYCBASE version 4.0: a revised database of O-glycosylated proteins” Gupta et al. Nucleic Acids Research, 27: 370-372 (1999); and “PhosphoBase, a database of phosphorylation sites: release 2.0.”, Kreegipuu et al. Nucleic Acids Res 27(1):237-239 (1999) see also, WO 02/21139A2, the disclosure of which is incorporated herein by reference in its entirety.

[0335] Tumorigenesis is often accompanied by alterations in the post-translational modifications of proteins. Thus, in another embodiment, the invention provides polypeptides from cancerous cells or tissues that have altered post-translational modifications compared to the post-translational modifications of polypeptides from normal cells or tissues. A number of altered post-translational modifications are known. One common alteration is a change in phosphorylation state, wherein the polypeptide from the cancerous cell or tissue is hyperphosphorylated or hypophosphorylated compared to the polypeptide from a normal tissue, or wherein the polypeptide is phosphorylated on different residues than the polypeptide from a normal cell. Another common alteration is a change in glycosylation state, wherein the polypeptide from the cancerous cell or tissue has more or less glycosylation than the polypeptide from a normal tissue, and/or wherein the polypeptide from the cancerous cell or tissue has a different type of glycosylation than the polypeptide from a noncancerous cell or tissue. Changes in glycosylation may be critical because carbohydrate-protein and carbohydrate-carbohydrate interactions are important in cancer cell progression, dissemination and invasion. See, e.g., Barchi, Curr. Pharm. Des. 6: 485-501 (2000), Verma, Cancer Biochem. Biophys. 14: 151-162 (1994) and Dennis et al., Bioessays 5: 412-421 (1999).

[0336] Another post-translational modification that may be altered in cancer cells is prenylation. Prenylation is the covalent attachment of a hydrophobic prenyl group (either farnesyl or geranylgeranyl) to a polypeptide. Prenylation is required for localizing a protein to a cell membrane and is often required for polypeptide function. For instance, the Ras superfamily of GTPase signalling proteins must be prenylated for function in a cell. See, e.g., Prendergast et al., Semin. Cancer Biol. 10: 443-452 (2000) and Khwaja et al., Lancet 355: 741-744 (2000).

[0337] Other post-translation modifications that may be altered in cancer cells include, without limitation, polypeptide methylation, acetylation, arginylation or racemization of amino acid residues. In these cases, the polypeptide front the cancerous cell may exhibit either increased or decreased amounts of the post-translational modification compared to the corresponding polypeptides from noncancerous cells.

[0338] Other polypeptide alterations in cancer cells include abnormal polypeptide cleavage of proteins and aberrant protein-protein interactions. Abnormal polypeptide cleavage may be cleavage of a polypeptide in a cancerous cell that does not usually occur in a normal cell, or a lack of cleavage in a cancerous cell, wherein the polypeptide is cleaved in a normal cell. Aberrant protein-protein interactions may be either covalent cross-linking or non-covalent binding between proteins that do not normally bind to each other. Alternatively, in a cancerous cell, a protein may fail to bind to another protein to which it is bound in a noncancerous cell. Alterations in cleavage or in protein-protein interactions may be due to over- or underproduction of a polypeptide in a cancerous cell compared to that in a normal cell, or may be due to alterations in post-translational modifications (see above) of one or more proteins in the cancerous cell. See, e.g., Henschen-Edman, Ann. N.Y. Acad. Sci. 936: 580-593 (2001).

[0339] Alterations in polypeptide post-translational modifications, as well as changes in polypeptide cleavage and protein-protein interactions, may be determined by any method known in the art. For instance, alterations in phosphorylation may be determined by using anti-phosphoserine, anti-phosphothreonine or anti-phosphotyrosine antibodies or by amino acid analysis. Glycosylation alterations may be determined using antibodies specific for different sugar residues, by carbohydrate sequencing, or by alterations in the size of the glycoprotein, which can be determined by, e.g., SDS polyacrylamide gel electrophoresis (PAGE). Other alterations of post-translational modifications, such as prenylation, racemization, methylation, acetylation and arginylation, may be determined by chemical analysis, protein sequencing, amino acid analysis, or by using antibodies specific for the particular post-translational modifications. Changes in protein-protein interactions and in polypeptide cleavage may be analyzed by any method known in the art including, without limitation, non-denaturing PAGE (for non-covalent protein-protein interactions), SDS PAGE (for covalent protein-protein interactions and protein cleavage), chemical cleavage, protein sequencing or immunoassays.

[0340] In another embodiment, the invention provides polypeptides that have been post-translationally modified. In one embodiment, polypeptides may be modified enzymatically or chemically, by addition or removal of a post-translational modification. For example, a polypeptide may be glycosylated or deglycosylated enzymatically. Similarly, polypeptides may be phosphorylated using a purified kinase, such as a MAP kinase (e.g, p38, ERK, or JNK) or a tyrosine kinase (e.g., Src or erbB2). A polypeptide may also be modified through synthetic chemistry. Alternatively, one may isolate the polypeptide of interest from a cell or tissue that expresses the polypeptide with the desired post-translational modification. In another embodiment, a nucleic acid molecule encoding the polypeptide of interest is introduced into a host cell that is capable of post-translationally modifying the encoded polypeptide in the desired fashion. If the polypeptide does not contain a motif for a desired post-translational modification, one may alter the post-translational modification by mutating the nucleic acid sequence of a nucleic acid molecule encoding the polypeptide so that it contains a site for the desired post-translational modification. Amino acid sequences that may be post-translationally modified are known in the art. See, e.g., the programs described above on the website www.expasy.org. The nucleic acid molecule may also be introduced into a host cell that is capable of post-translationally modifying the encoded polypeptide. Similarly, one may delete sites that are post-translationally modified by either mutating the nucleic acid sequence so that the encoded polypeptide does not contain the post-translational modification motif, or by introducing the native nucleic acid molecule into a host cell that is not capable of post-translationally modifying the encoded polypeptide.

[0341] It will be appreciated, as is well known and as noted above, that polypeptides are not always entirely linear. For instance, polypeptides may be branched as a result of ubiquitination, and they may be circular, with or without branching, generally as a result of posttranslation events, including natural processing event and events brought about by human manipulation which do not occur naturally. Circular, branched and branched circular polypeptides may be synthesized by non-translation natural process and by entirely synthetic methods, as well. Modifications can occur anywhere in a polypeptide, including the peptide backbone, the amino acid side-chains and the amino or carboxyl termini. In fact, blockage of the amino or carboxyl group in a polypeptide, or both, by a covalent modification, is common in naturally occurring and synthetic polypeptides and such modifications may be present in polypeptides of the present invention, as well. For instance, the amino terminal residue of polypeptides made in E. coli, prior to proteolytic processing, almost invariably will be N-formylmethionine.

[0342] Useful post-synthetic (and post-translational) modifications include conjugation to detectable labels, such as fluorophores. A wide variety of amine-reactive and thiol-reactive fluorophore derivatives have been synthesized that react under nondenaturing conditions with N-terminal amino groups and epsilon amino groups of lysine residues, on the one hand, and with free thiol groups of cysteine residues, on the other.

[0343] Kits are available commercially that permit conjugation of proteins to a variety of amine-reactive or thiol-reactive fluorophores: Molecular Probes, Inc. (Eugene, Oreg., USA), e.g., offers kits for conjugating proteins to Alexa Fluor 350, Alexa Fluor 430, Fluorescein-EX, Alexa Pluor 488, Oregon Green 488, Alexa Fluor 532, Alexa Fluor 546, Alexa Fluor 546, Alexa Fluor 568, Alexa Fluor 594, and Texas Red-X.

[0344] A wide variety of other amine-reactive and thiol-reactive fluorophores are available commercially (Molecular Probes, Inc., Eugene, Oreg., USA), including Alexa Fluor® 350, Alexa Fluor® 488, Alexa Fluor® 532, Alexa Fluor® 546, Alexa Fluor® 568, Alexa Fluor® 594, Alexa Fluor® 647 (monoclonal antibody labeling kits available from Molecular Probes, Inc., Eugene, Oreg., USA), BODIPY dyes, such as BODIPY 493/503, BODIPY FL, BODIPY R6G, BODIPY 530/550, BODIPY TMR, BODIPY 558/568, BODIPY 558/568, BODIPY 564/570, BODIPY 576/589, BODIPY 581/591, BODIPY TR, BODIPY 630/650, BODIPY 650/665, Cascade Blue, Cascade Yellow, Dansyl, lissamine rhodamine B, Marina Blue, Oregon Green 488, Oregon Green 514, Pacific Blue, rhodamine 6G, rhodamine green, rhodamine red, tetramethylrhodamine, Texas Red (available from Molecular Probes, Inc., Eugene, Oreg., USA).

[0345] The polypeptides of the present invention can also be conjugated to fluorophores, other proteins, and other macromolecules, using bifunctional linking reagents. Common homobifunctional reagents include, e.g., APG, AEDP, BASED, BMB, BMDB, BMH, BMOE, BM[PEO]3, BM[PEO]4, BS3, BSOCOES, DFDNB, DMA, DMP, DMS, DPDPB, DSG, DSP (Lomant's Reagent), DSS, DST, DTBP, DTME, DTSSP, EGS, HBVS, Sulfo-BSOCOES, Sulfo-DST, Sulfo-EGS (all available from Pierce, Rockford, Ill., USA); common heterobifunctional cross-linkers include ABH, AMAS, ANB-NOS, APDP, ASBA, BMPA, BMPH, BMPS, EDC, EMCA, EMCH, EMCS, KMUA, KMUH, GMBS, LC-SMCC, LC-SPDP, MBS, M2C2H, MPBH, MSA, NHS-ASA, PDPH, PMPI, SADP, SAED, SAND, SANPAH, SASD, SATP, SBAP, SFAD, SIA, SIAB, SMCC, SMPB, SMPH, SMPT, SPDP, Sulfo-EMCS, Sulfo-GMBS, Sulfo-HSAB, Sulfo-KMUS, Sulfo-LC-SPDP, Sulfo-MBS, Sulfo-NHS-LC-ASA, Sulfo-SADP, Sulfo-SANPAH, Sulfo-SIAB, Sulfo-SMCC, Sulfo-SMPB, Sulfo-LC-SMPT, SVSB, TFCS (all available Pierce, Rockford, Ill., USA).

[0346] Polypeptides of the present invention, including full length polypeptides, fragments and fusion proteins, can be conjugated, using such cross-linking reagents, to fluorophores that are not amine- or thiol-reactive. Other labels that usefully can be conjugated to polypeptides of the present invention include radioactive labels, echosonographic contrast reagents, and MRI contrast agents.

[0347] Polypeptides of the present invention, including full length polypeptide, fragments and fusion proteins, can also usefully be conjugated using cross-linking agents to carrier proteins, such as KLH, bovine thyroglobulin, and even bovine serum albumin (BSA), to increase immunogenicity for raising anti-CaSP antibodies.

[0348] Polypeptides of the present invention, including full length polypeptide, fragments and fusion proteins, can also usefully be conjugated to polyethylene glycol (PEG); PEGylation increases the serum half life of proteins administered intravenously for replacement therapy. Delgado et al., Crit. Rev. Ther. Drug Carrier Syst. 9(3-4): 249-304 (1992); Scott et al., Curr. Pharm. Des. 4(6): 423-38 (1998); DeSantis et al., Curr. Opin. Biotechnol. 10(4): 324-30 (1999). PEG monomers can be attached to the protein directly or through a linker, with PEGylation using PEG monomers activated with tresyl chloride (2,2,2-trifluoroethanesulphonyl chloride) permitting direct attachment under mild conditions.

[0349] Polypeptides of the present invention are also inclusive of analogs of a polypeptide encoded by a nucleic acid molecule according to the instant invention. In a preferred embodiment, this polypeptide is a CaSP. In a more preferred embodiment, this polypeptide is derived from a polypeptide having part or all of the amino acid sequence of SEQ ID NO: 142-361. Also preferred is an analog polypeptide comprising one or more substitutions of non-natural amino acids or non-native inter-residue bonds compared to the naturally occurring polypeptide. In one embodiment, the analog is structurally similar to a CaSP, but one or more peptide linkages is replaced by a linkage selected from the group consisting of —CH₂NH—, —CH₂S—, —CH₂—CH₂—, —CH═CH—(cis and trans), —COCH₂—, —CH(OH)CH₂—and —CH₂SO—. In another embodiment, the analog comprises substitution of one or more amino acids of a CaSP with a D-amino acid of the same type or other non-natural amino acid in order to generate more stable peptides. D-amino acids can readily be incorporated during chemical peptide synthesis: peptides assembled from D-amino acids are more resistant to proteolytic attack; incorporation of D-amino acids can also be used to confer specific three-dimensional conformations on the peptide. Other amino acid analogues commonly added during chemical synthesis include ornithine, norleucine, phosphorylated amino acids (typically phosphoserine, phosphothreonine, phosphotyrosine), L-malonyltyrosine, a non-hydrolyzable analog of phosphotyrosine (see, e.g., Kole et al., Biochem. Biophys. Res. Com. 209: 817-821 (1995)), and various halogenated phenylalanine derivatives.

[0350] Non-natural amino acids can be incorporated during solid phase chemical synthesis or by recombinant techniques, although the former is typically more common. Solid phase chemical synthesis of peptides is well established in the art. Procedures are described, inter alia, in Chan et al. (eds.), Fmoc Solid Phase Peptide Synthesis: A Practical Approach (Practical Approach Series), Oxford Univ. Press (March 2000); Jones, Amino Acid and Peptide Synthesis (Oxford Chemistry Primers, No 7), Oxford Univ. Press (1992); and Bodanszky, Principles of Peptide Synthesis (Springer Laboratory), Springer Verlag (1993).

[0351] Amino acid analogues having detectable labels are also usefully incorporated during synthesis to provide derivatives and analogs. Biotin, for example can be added using biotinoyl-(9-fluorenylmethoxycarbonyl)-L-lysine (FMOC biocytin) (Molecular Probes, Eugene, Oreg., USA). Biotin can also be added enzymatically by incorporation into a fusion protein of a E. coli BirA substrate peptide. The FMOC and tBOC derivatives of dabcyl-L-lysine (Molecular Probes, Inc., Eugene, Oreg., USA) can be used to incorporate the dabcyl chromophore at selected sites in the peptide sequence during synthesis. The aminonaphthalene derivative EDANS, the most common fluorophore for pairing with the dabcyl quencher in fluorescence resonance energy transfer FRET) systems, can be introduced during automated synthesis of peptides by using EDANS-FMOC-L-glutamic acid or the corresponding tBOC derivative (both from Molecular Probes, Inc., Eugene, Oreg., USA). Tetramethylrhodamine fluorophores can be incorporated during automated FMOC synthesis of peptides using (FMOC)-TMR-L-lysine (Molecular Probes, Inc. Eugene, Oreg., USA).

[0352] Other useful amino acid analogues that can be incorporated during chemical synthesis include aspartic acid, glutamic acid, lysine, and tyrosine analogues having allyl side-chain protection (Applied Biosystems, Inc., Foster City, Calif., USA); the allyl side chain permits synthesis of cyclic, branched-chain, sulfonated, glycosylated, and phosphorylated peptides.

[0353] A large number of other FMOC-protected non-natural amino acid analogues capable of incorporation during chemical synthesis are available commercially, including, e.g., Fmoc-2-aminobicyclo[2.2.1]heptane-2-carboxylic acid, Fmoc-3-endo-aminobicyclo[2.2.1]heptane-2-endo-carboxylic acid, Fmoc-3-exo-aminobicyclo[2.2.1]heptane-2-exo-carboxylic acid, Fmoc-3-endo-amino-bicyclo[2.2.1]hept-5-ene-2-endo-carboxylic acid, Fmoc-3-exo-amino-bicyclo[2.2.1]hept-5-ene-2-exo-carboxylic acid, Fmoc-cis-2-amino-1-cyclohexanecarboxylic acid, Fmoc-trans-2-amino-1-cyclohexanecarboxylic acid, Fmoc-1-amino-1-cyclopentanecarboxylic acid, Fmoc-cis-2-amino-1-cyclopentanecarboxylic acid, Fmoc-1-amino-1-cyclopropanecarboxylic acid, Fmoc-D-2-amino-4-(ethylthio)butyric acid, Fmoc-L-2-amino-4-(ethylthio)butyric acid, Fmoc-L-buthionine, Fmoc-5-methyl-L-Cysteine, Fmoc-2-aminobenzoic acid (anthranillic acid), Fmoc-3-aminobenzoic acid, Fmoc-4-aminobenzoic acid, Fmoc-2-aminobenzophenone-2′-carboxylic acid, Fmoc-N-(4-aminobenzoyl)-β-alanine, Fmoc-2-amino-4,5-dimethoxybenzoic acid, Fmoc-4-aminohippuric acid, Fmoc-2-amino-3-hydroxybenzoic acid, Fmoc-2-amino-5-hydroxybenzoic acid, Fmoc-3-amino-4-hydroxybenzoic acid, Fmoc-4-amino-3-hydroxybenzoic acid, Fmoc-4-amino-2-hydroxybenzoic acid, Fmoc-5-amino-2-hydroxybenzoic acid, Fmoc-2-amino-3-methoxybenzoic acid, Fmoc-4-amino-3-methoxybenzoic acid, Fmoc-2-amino-3-methylbenzoic acid, Fmoc-2-amino-5-methylbenzoic acid, Fmoc-2-amino-6-methylbenzoic acid, Fmoc-3-amino-2-methylbenzoic acid, Fmoc-3-amino-4-methylbenzoic acid, Fmoc-4-amino-3-methylbenzoic acid, Fmoc-3-amino-2-naphtoic acid, Fmoc-D,L-3-amino-3-phenylpropionic acid, Fmoc-L-Methyldopa, Fmoc-2-amino-4,6-dimethyl-3-pyridinecarboxylic acid, Fmoc-D,L-amino-2-thiophenacetic acid, Fmoc-4-(carboxymethyl)piperazine, Fmoc-4-carboxypiperazine, Fmoc-4-(carboxymethyl)homopiperazine, Fmoc-4-phenyl-4-piperidinecarboxylic acid, Fmoc-L-1,2,3,4-tetrahydronorharman-3-carboxylic acid, Fmoc-L-thiazolidine-4-carboxylic acid, all available from The Peptide Laboratory (Richmond, Calif., USA).

[0354] Non-natural residues can also be added biosynthetically by engineering a suppressor tRNA, typically one that recognizes the UAG stop codon, by chemical aminoacylation with the desired unnatural amino acid. Conventional site-directed mutagenesis is used to introduce the chosen stop codon UAG at the site of interest in the protein gene. When the acylated suppressor tRNA and the mutant gene are combined in an in vitro transcription/translation system, the unnatural amino acid is incorporated in response to the UAG codon to give a protein containing that amino acid at the specified position. Liu et al., Proc. Natl. Acad. Sci. USA 96(9): 4780-5 (1999); Wang et al., Science 292(5516): 498-500 (2001).

[0355] Fusion Proteins

[0356] Another aspect of the present invention relates to the fusion of a polypeptide of the present invention to heterologous polypeptides. In a preferred embodiment, the polypeptide of the present invention is a CaSP. In a more preferred embodiment, the polypeptide of the present invention that is fused to a heterologous polypeptide comprises part or all of the amino acid sequence of SEQ ID NO: 142-361, or is a mutein, homologous polypeptide, analog or derivative thereof. In an even more preferred embodiment, the fusion protein is encoded by a nucleic acid molecule comprising all or part of the nucleic acid sequence of SEQ ID NO: 1-141, or comprises all or part of a nucleic acid sequence that selectively hybridizes or is homologous to a nucleic acid molecule comprising a nucleic acid sequence of SEQ ID NO: 1-141.

[0357] The fusion proteins of the present invention will include at least one fragment of a polypeptide of the present invention, which fragment is at least 6, typically at least 8, often at least 15, and usefully at least 16, 17, 18, 19, or 20 amino acids long. The fragment of the polypeptide of the present to be included in the fusion can usefully be at least 25 amino acids long, at least 50 amino acids long, and can be at least 75, 100, or even 150 amino acids long. Fusions that include the entirety of a polypeptide of the present invention have particular utility.

[0358] The heterologous polypeptide included within the fusion protein of the present invention is at least 6 amino acids in length, often at least 8 amino acids in length, and preferably at least 15, 20, or 25 amino acids in length. Fusions that include larger polypeptides, such as the IgG Fc region, and even entire proteins (such as GFP chromophore-containing proteins) are particularly useful.

[0359] As described above in the description of vectors and expression vectors of the present invention, which discussion is incorporated here by reference in its entirety, heterologous polypeptides to be included in the fusion proteins of the present invention can usefully include those designed to facilitate purification and/or visualization of recombinantly-expressed proteins. See, e.g., Ausubel, Chapter 16, (1992), supra. Although purification tags can also be incorporated into fusions that are chemically synthesized, chemical synthesis typically provides sufficient purity that further purification by HPLC suffices; however, visualization tags as above described retain their utility even when the protein is produced by chemical synthesis, and when so included render the fusion proteins of the present invention useful as directly detectable markers of the presence of a polypeptide of the invention.

[0360] As also discussed above, heterologous polypeptides to be included in the fusion proteins of the present invention can usefully include those that facilitate secretion of recombinantly expressed proteins into the periplasmic space or extracellular milieu for prokaryotic hosts or into the culture medium for eukaryotic cells through incorporation of secretion signals and/or leader sequences. For example, a His⁶ tagged protein can be purified on a Ni affinity column and a GST fusion protein can be purified on a glutathione affinity column. Similarly, a fusion protein comprising the Fc domain of IgG can be purified on a Protein A or Protein G column and a fusion protein comprising an epitope tag such as myc can be purified using an immunoaffinity column containing an anti-c-myc antibody. It is preferable that the epitope tag be separated from the protein encoded by the essential gene by an enzymatic cleavage site that can be cleaved after purification. See also the discussion of nucleic acid molecules encoding-fusion proteins that may be expressed on the surface of a cell.

[0361] Other useful fusion proteins of the present invention include those that permit use of the polypeptide of the present invention as bait in a yeast two-hybrid system. See Bartel et al. (eds.), The Yeast Two-Hybrid System. Oxford University Press (1997); Zhu et al., Yeast Hybrid Technologies, Eaton Publishing (2000); Fields et al., Trends Genet. 10(8): 286-92 (1994); Mendelsohn et al., Curr. Opin. Biotechnol. 5(5): 482-6 (1994); Luban et al., Curr. Opin. Biotechnol. 6(1): 59-64 (1995); Allen et al., Trends Biochem. Sci. 20(12): 511-6 (1995); Drees, Curr. Opin. Chem. Biol. 3(1): 64-70 (1999); Topcu et al., Pharm. Res. 17(9): 1049-55 (2000); Fashena et al., Gene 250(1-2): 1-14 (2000); Colas et al., Nature 380, 548-550 (1996); Norman, T. et al., Science 285, 591-595 (1999); Fabbrizio et al., Oncogene 18, 4357-4363 (1999); Xu et al., Proc Natl Acad Sci USA. 94, 12473-12478 (1997); Yang, et al., Nuc. Acids Res. 23, 1152-1156 (1995); Kolonin et al., Proc Natl Acad Sci USA 95, 14266-14271 (1998); Cohen et al., Proc Natl Acad Sci USA 95, 14272-1427 (1998); Uetz, et al. Nature 403, 623-627(2000); Ito, et al., Proc Natl Acad Sci USA 98, 4569-4574 (2001). Typically, such fusion is to either E. coli LexA or yeast GAL4 DNA binding domains. Related bait plasmids are available that express the bait fused to a nuclear localization signal.

[0362] Other useful fusion proteins include those that permit display of the encoded polypeptide on the surface of a phage or cell, fusions to intrinsically fluorescent proteins, such as green fluorescent protein (GFP), and fusions to the IgG Fc region, as described above.

[0363] The polypeptides of the present invention can also usefully be fused to protein toxins, such as Pseudomonas exotoxin A, diphtheria toxin, shiga toxin A, anthrax toxin lethal factor, ricin, in order to effect ablation of cells that bind or take up the proteins of the present invention.

[0364] Fusion partners include, inter alia, myc, hemagglutinin (HA), GST, immunoglobulins, β-galactosidase, biotin trpE, protein A, β-lactamase, α-amylase, maltose binding protein, alcohol dehydrogenase, polyhistidine (for example, six histidine at the amino and/or carboxyl terminus of the polypeptide), lacZ, green fluorescent protein (GFP), yeast a mating factor, GAL4 transcription activation or DNA binding domain, luciferase, and serum proteins such as ovalbumin, albumin and the constant domain of IgG. See, e.g., Ausubel (1992), supra and Ausubel (1999), supra. Fusion proteins may also contain sites for specific enzymatic cleavage, such as a site that is recognized by enzymes such as Factor XIII, trypsin, pepsin, or any other enzyme known in the art. Fusion proteins will typically be made by either recombinant nucleic acid methods, as described above, chemically synthesized using techniques well known in the art (e.g., a Merrifield synthesis), or produced by chemical cross-linking.

[0365] Another advantage of fusion proteins is that the epitope tag can be used to bind the fusion protein to a plate or column through an affinity linkage for screening binding proteins or other molecules that bind to the CaSP.

[0366] As further described below, the polypeptides of the present invention can readily be used as specific immunogens to raise antibodies that specifically recognize polypeptides of the present invention including CaSPs and their allelic variants and homologues. The antibodies, in turn, can be used, inter alia, specifically to assay for the polypeptides of the present invention, particularly CaSPs, e.g. by ELISA for detection of protein fluid samples, such as serum, by immunohistochemistry or laser scanning cytometry, for detection of protein in tissue samples, or by flow cytometry, for detection of intracellular protein in cell suspensions, for specific antibody-mediated isolation and/or purification of CaSPs, as for example by immunoprecipitation, and for use as specific agonists or antagonists of CaSPs.

[0367] One may determine whether polypeptides of the present invention including CaSPs, muteins, homologous proteins or allelic variants or fusion proteins of the present invention are functional by methods known in the art. For instance, residues that are tolerant of change while retaining function can be identified by altering the polypeptide at known residues using methods known in the art, such as alanine scanning mutagenesis, Cunningham et al., Science 244(4908): 1081-5 (1989); transposon linker scanning mutagenesis, Chen et al., Gene 263(1-2): 39-48 (2001); combinations of homolog- and alanine-scanning mutagenesis, Jin et al., J. Mol. Biol. 226(3): 851-65 (1992); combinatorial alanine scanning, Weiss et al., Proc. Natl. Acad. Sci USA 97(16): 8950-4 (2000), followed by functional assay. Transposon linker scanning kits are available commercially (New England Biolabs, Beverly, Mass., USA, catalog. no. E7-102S; EZ::TN™ In-Frame Linker Insertion Kit, catalogue no. EZI04KN, (Epicentre Technologies Corporation, Madison, Wis., USA).

[0368] Purification of the polypeptides or fusion proteins of the present invention is well known and within the skill of one having ordinary skill in the art. See, e.g., Scopes, Protein Purifications 2d ed. (1987). Purification of recombinantly expressed polypeptides is described above. Purification of chemically-synthesized peptides can readily be effected, e.g., by HPLC.

[0369] Accordingly, it is an aspect of the present invention to provide the isolated polypeptides or fusion proteins of the present invention in pure or substantially pure form in the presence of absence of a stabilizing agent. Stabilizing agents include both proteinaceous and non-proteinaceous material and are well known in the art. Stabilizing agents, such as albumin and polyethylene glycol (PEG) are known and are commercially available.

[0370] Although high levels of purity are preferred when the isolated polypeptide or fusion protein of the present invention are used as therapeutic agents, such as in vaccines and replacement therapy, the isolated polypeptides of the present invention are also useful at lower purity. For example, partially purified polypeptides of the present invention can be used as immunogens to raise antibodies in laboratory animals.

[0371] In a preferred embodiment, the purified and substantially purified polypeptides of the present invention are in compositions that lack detectable ampholytes, acrylamide monomers, bis-acrylamide monomers, and polyacrylamide.

[0372] The polypeptides or fusion proteins of the present invention can usefully be attached to a substrate. The substrate can be porous or solid, planar or non-planar; the bond can be covalent or noncovalent. For example, the peptides of the invention may be stabilized by covalent linkage to albumin. See, U.S. Pat. No. 5,876,969, the contents of which are hereby incorporated in its entirety.

[0373] For example, the polypeptides or fusion proteins of the present invention can usefully be bound to a porous substrate, commonly a membrane, typically comprising nitrocellulose, polyvinylidene fluoride (PVDF), or cationically derivatized, hydrophilic PVDF; so bound, the polypeptides or fusion proteins of the present invention can be used to detect and quantify antibodies, e.g. in serum, that bind specifically to the immobilized polypeptide or fusion protein of the present invention.

[0374] As another example, the polypeptides or fusion proteins of the present invention can usefully be bound to a substantially nonporous substrate, such as plastic, to detect and quantify antibodies, e.g. in serum, that bind specifically to the immobilized protein of the present invention. Such plastics include polymethylacrylic, polyethylene, polypropylene, polyacrylate, polymethylmethacrylate, polyvinylchloride, polytetrafluoroethylene, polystyrene, polycarbonate, polyacetal, polysulfone, celluloseacetate, cellulosenitrate, nitrocellulose, or mixtures thereof; when the assay is performed in a standard microtiter dish, the plastic is typically polystyrene.

[0375] The polypeptides and fusion proteins of the present invention can also be attached to a substrate suitable for use as a surface enhanced laser desorption ionization source; so attached, the polypeptide or fusion protein of the present invention is useful for binding and then detecting secondary proteins that bind with sufficient affinity or avidity to the surface-bound polypeptide or fusion protein to indicate biologic interaction there between. The polypeptides or fusion proteins of the present invention can also be attached to a substrate suitable for use in surface plasmon resonance detection; so attached, the polypeptide or fusion protein of the present invention is useful for binding and then detecting secondary proteins that bind with sufficient affinity or avidity to the surface-bound polypeptide or fusion protein to indicate biological interaction there between.

Alternative Transcripts

[0376] In another aspect, the present invention provides splice variants of genes and proteins encoded thereby. The identification of a novel splice varaint which encodes an amino acid sequence with a novel region can be targeted for the generation of reagents for use in detection and/or treatment of cancer. The novel amino acid sequence may lead to a unique protein structure, protein subcellular localization, biochemical processing or function of the splice varaint. This information can be used to directly or indirectly facilitate the generation of additional or novel therapeutics or diagnostics. The nucleotide sequence in this novel splice variant can be used as a nucleic acid probe for the diagnosis and/or treatment of cancer.

[0377] Specifically, the newly identified sequences may enable the production of new antibodies or compounds directed against the novel region for use as a therapeutic or diagnostic. Alternatively, the newly identified sequences may alter the biochemical or biological properties of the encoded protein in such a way as to enable the generation of improved or different therapeutics targeting this protein.

Antibodies

[0378] In another aspect, the invention provides antibodies, including fragments and derivatives thereof, that bind specifically to polypeptides encoded by the nucleic acid molecules of the invention. In a preferred embodiment, the antibodies are specific for a polypeptide that is a CaSP, or a fragment, mutein, derivative, analog or fusion protein thereof. In a more preferred embodiment, the antibodies are specific for a polypeptide that comprises SEQ ID NO: 142-361, or a fragment, mutein, derivative, analog or fusion protein thereof.

[0379] The antibodies of the present invention can be specific for linear epitopes, discontinuous epitopes, or conformational epitopes of such proteins or protein fragments, either as present on the protein in its native conformation or, in some cases, as present on the proteins as denatured, as, e.g., by solubilization in SDS. New epitopes may be also due to a difference in post translational modifications (PTMs) in disease versus normal tissue. For example, a particular site on a CaSP may be glycosylated in cancerous cells, but not glycosylated in normal cells or vis versa. In addition, alternative splice forms of a CaSP may be indicative of cancer. Differential degradation of the C or N-terminus of a CaSP may also be a marker or target for anticancer therapy. For example, an CaSP may be N-terminal degraded in cancer cells exposing new epitopes to which antibodies may selectively bind for diagnostic or therapeutic uses.

[0380] As is well known in the art, the degree to which an antibody can discriminate as among molecular species in a mixture will depend, in part, upon the conformational relatedness of the species in the mixture; typically, the antibodies of the present invention will discriminate over adventitious binding to non-CaSP polypeptides by at least two-fold, more typically by at least 5-fold, typically by more than 10-fold, 25-fold, 50-fold, 75-fold, and often by more than 100-fold, and on occasion by more than 500-fold or 1000-fold. When used to detect the proteins or protein fragments of the present invention, the antibody of the present invention is sufficiently specific when it can be used to determine the presence of the polypeptide of the present invention in samples derived from normal or cancerous human breast, colon, lung, ovarian or prostate tissue.

[0381] Typically, the affinity or avidity of an antibody (or antibody multimer, as in the case of an IgM pentamer) of the present invention for a protein or protein fragment of the present invention will be at least about 1×10⁻⁶ molar (M), typically at least about 5×10⁻⁷ M, 1×10⁻⁷ M, with affinities and avidities of at least 1×10⁻⁸ M, 5×10⁻⁹ M, 1×10⁻¹⁰ M and up to 1×10⁻¹³ M proving especially useful.

[0382] The antibodies of the present invention can be naturally occurring forms, such as IgG, IgM, IgD, IgE, IgY, and IgA, from any avian, reptilian, or mammalian species.

[0383] Human antibodies can, but will infrequently, be drawn directly from human donors or human cells. In such case, antibodies to the polypeptides of the present invention will typically have resulted from fortuitous immunization, such as autoimmune immunization, with the polypeptide of the present invention. Such antibodies will typically, but will not invariably, be polyclonal. In addition, individual polyclonal antibodies may be isolated and cloned to generate monoclonals.

[0384] Human antibodies are more frequently obtained using transgenic animals that express human immunoglobulin genes, which transgenic animals can be affirmatively immunized with the protein immunogen of the present invention. Human Ig-transgenic mice capable of producing human antibodies and methods of producing human antibodies therefrom upon specific immunization are described, inter alia, in U.S. Pat. Nos. 6,162,963; 6,150,584; 6,114,598; 6,075,181; 5,939,598; 5,877,397; 5,874,299; 5,814,318; 5,789,650; 5,770,429; 5;661,016; 5,633,425; 5,625,126; 5,569,825; 5,545,807; 5,545,806, and 5,591,669, the disclosures of which are incorporated herein by reference in their entireties. Such antibodies are typically monoclonal, and are typically produced using techniques developed for production of murine antibodies.

[0385] Human antibodies are particularly useful, and often preferred, when the antibodies of the present invention are to be administered to human beings as in vivo diagnostic or therapeutic agents, since recipient immune response to the administered antibody will often be substantially less than that occasioned by administration of an antibody derived from another species, such as mouse.

[0386] IgG, IgM, IgD, IgE, IgY, and IgA antibodies of the present invention are also usefully obtained from other species, including mammals such as rodents (typically mouse, but also rat, guinea pig, and hamster), lagomorphs (typically rabbits), and also larger mammals, such as sheep, goats, cows, and horses; or egg laying birds or reptiles such as chickens or alligators. In such cases, as with the transgenic human-antibody-producing non-human mammals, fortuitous immunization is not required, and the non-human mammal is typically affirmatively immunized, according to standard immunization protocols, with the polypeptide of the present invention. One form of avian antibodies may be generated using techniques described in WO 00/29444, published 25 May 2000.

[0387] As discussed above, virtually all fragments of 8 or more contiguous amino acids of a polypeptide of the present invention can be used effectively as immunogens when conjugated to a carrier, typically a protein such as bovine thyroglobulin, keyhole limpet hemocyanin, or bovine serum albumin, conveniently using a bifunctional linker such as those described elsewhere above, which discussion is incorporated by reference here.

[0388] Immunogenicity can also be conferred by fusion of the polypeptide of the present invention to other moieties. For example, polypeptides of the present invention can be produced by solid phase synthesis on a branched polylysine core matrix; these multiple antigenic peptides (MAPs) provide high purity, increased avidity, accurate chemical definition and improved safety in vaccine development. Tam et al., Proc. Natl. Acad. Sci. USA 85: 5409-5413 (1988); Posnett et al, J. Biol. Chem. 263: 1719-1725 (1988).

[0389] Protocols for immunizing non-human mammals or avian species are well-established in the art. See Harlow et al. (eds.), Using Antibodies: A Laboratory Manual, Cold Spring Harbor Laboratory (1998); Coligan et al. (eds.), Current Protocols in Immunology, John Wiley & Sons, Inc. (2001); Zola, Monoclonal Antibodies: Preparation and Use of Monoclonal Antibodies and Engineered Antibody Derivatives (Basics: From Background to Bench) Springer Verlag (2000); Gross M, Speck J. Dtsch. Tierarztl. Wochenschr. 103: 417-422(1996). Immunization protocols often include multiple immunizations, either with or without adjuvants such as Freund's complete adjuvant and Freund's incomplete adjuvant, and may include naked DNA immunization (Moss, Semin. Immunol. 2: 317-327 (1990).

[0390] Antibodies from non-human mammals and avian species can be polyclonal or monoclonal, with polyclonal antibodies having certain advantages in immunohistochemical detection of the polypeptides of the present invention and monoclonal antibodies having advantages in identifying and distinguishing particular epitopes of the polypeptides of the present invention. Antibodies from avian species may have particular advantage in detection of the polypeptides of the present invention, in human serum or tissues (Vikinge et al., Biosens. Bioelectron. 13: 1257-1262 (1998). Following immunization, the antibodies of the present invention can be obtained using any art-accepted technique. Such techniques are well known in the art and are described in detail in references such as Coligan, supra; Zola, supra; Howard et al. (eds.), Basic Methods in Antibody Production and Characterization, CRC Press (2000); Harlow, supra; Davis (ed.), Monoclonal Antibody Protocols, Vol. 45, Humana Press (1995); Delves (ed.), Antibody Production: Essential Techniques, John Wiley & Son Ltd (1997); and Kenney, Antibody Solution: An Antibody Methods Manual, Chapman & Hall (1997).

[0391] Briefly, such techniques include, inter alia, production of monoclonal antibodies by hybridomas and expression of antibodies or fragments or derivatives thereof from host cells engineered to express immunoglobulin genes or fragments thereof. These two methods of production are not mutually exclusive: genes encoding antibodies specific for the polypeptides of the present invention can be cloned from hybridomas and thereafter expressed in other host cells. Nor need the two necessarily be performed together: e.g., genes encoding antibodies specific for the polypeptides of the present invention can be cloned directly from B cells known to be specific for the desired protein, as further described in U.S. Pat. No. 5,627,052, the disclosure of which is incorporated herein by reference in its entirety, or from antibody-displaying phage.

[0392] Recombinant expression in host cells is particularly useful when fragments or derivatives of the antibodies of the present invention are desired.

[0393] Host cells for recombinant antibody production of whole antibodies, antibody fragments, or antibody derivatives can be prokaryotic or eukaryotic.

[0394] Prokaryotic hosts are particularly useful for producing phage displayed antibodies of the present invention.

[0395] The technology of phage-displayed antibodies, in which antibody variable region fragments are fused, for example, to the gene III protein (pIII) or gene VIII protein (pVIII) for display on the surface of filamentous phage, such as M13, is by now well-established. See, e.g., Sidhu, Curr. Opin. Biotechnol. 11(6): 610-6 (2000); Griffiths et al., Curr. Opin: Biotechnol. 9(1): 102-8 (1998); Hoogenboom et al., Immunotechnology, 4(1): 1-20 (1998); Rader et al., Current Opinion in Biotechnology 8: 503-508 (1997); Aujame et al., Human Antibodies 8: 155-168 (1997); Hoogenboom, Trends in Biotechnol. 15: 62-70 (1997); de Kruif et al., 17: 453-455 (1996); Barbas et al., Trends in Biotechnol. 14: 230-234 (1996); Winter et al., Ann. Rev. Immunol. 433-455 (1994). Techniques and protocols required to generate, propagate, screen (pan), and use the antibody fragments from such libraries have recently been compiled. See, e.g., Barbas (2001), supra; Kay, supra; and Abelson, supra.

[0396] Typically, phage-displayed antibody fragments are scFv fragments or Fab fragments; when desired, fall length antibodies can be produced by cloning the variable regions from the displaying phage into a complete antibody and expressing the full length antibody in a farther prokaryotic or a eukaryotic host cell. Eukaryotic cells are also useful for expression of the antibodies, antibody fragments, and antibody derivatives of the present invention. For example, antibody fragments of the present invention can be produced in Pichia pastoris and in Saccharomyces cerevisiae. See, e.g., Takahashi et al., Biosci. Biotechnol. Biochem. 64(10): 2138-44 (2000); Freyre et al., J. Biotechnol. 76(2-3):1 57-63 (2000); Fischer et al., Biotechnol. Appl. Biochem. 30 (t 2): 117-20 (1999); Pennell et al., Res. Immunol. 149(6): 599-603 (1998); Eldin et al., J. Immunol. Methods. 201(1): 67-75 (1997); Frenken et al., Res. Immunol. 149(6): 589-99 (1998); and Shusta et al., Nature Biotechnol. 16(8): 773-7 (1998).

[0397] Antibodies, including antibody fragments and derivatives, of the present invention can also be produced in insect cells. See, e.g., Li et al., Protein Expr. Purif. 21(1): 121-8 (2001); Ailor et al., Biotechnol. Bioeng. 58(2-3): 196-203 (1998); Hsu et al., Biotechnol. Prog. 13(1): 96-104 (1997); Edelman et al., Immunology 91(1): 13-9 (1997); and Nesbit et al., J. Immunol. Methods 151(1-2): 201-8 (1992).

[0398] Antibodies and fragments and derivatives thereof of the present invention can also be produced in plant cells, particularly maize or tobacco, Giddings et al., Nature Biotechnol. 18(11):1151-5(2000); Gavilondo et al., Biotechniques 29(1): 128-38 (2000); Fischer et al., J. Biol. Regul. Homeost. Agents 14(2): 83-92 (2900); Fischer et al., Biotechnol. Appl. Biochem. 30 (Pt 2): 113-6 (1999) Fischer et al., Biol. Chem. 380(7-8): 825-39 (1999); Russell, Curr. Top. Microbiol. Immunol. 240:119-38 (1999); and Ma et al., Plant Physiol. 109(2): 341-6 (1995).

[0399] Antibodies, including antibody fragments and derivatives, of the present invention can also be produced in transgenic, non-human, mammalian milk. See, e.g: Pollock et al., J. Immunol Methods. 231: 147-57 (1999); Young et al., Res. Immunol. 149: 609-10 (1998); and Limonta et al., Immunotechnology 1: 107-13 (1995).

[0400] Mammalian cells useful for recombinant expression of antibodies, antibody fragments, and antibody derivatives of the present invention include CHO cells, COS cells, 293 cells, and myeloma cells. Verma et al., J. Immunol. Methods 216(1-2):165-81 (1998) review and compare bacterial, yeast, insect and mammalian expression systems for expression of antibodies. Antibodies of the present invention can also be prepared by cell free translation, as further described in Merk et al., J. Biochem. (Tokyo) 125(2): 328-33 (1999) and Ryabova et al., Nature Biotechnol. 15(1): 79-84 (1997), and in the milk of transgenic animals, as further described in Pollock et al., J. Immunol. Methods 231(1-2): 147-57 (1999).

[0401] The invention further provides antibody fragments that bind specifically to one or more of the polypeptides of the present invention, to one or more of the polypeptides encoded by the isolated nucleic acid molecules of the present invention, or the binding of which can be competitively inhibited by one or more of the polypeptides of the present invention or one or more of the polypeptides encoded by the isolated nucleic acid molecules of the present invention. Among such useful fragments are Fab, Fab′, Fv, F(ab)′₂, and single chain Fv (scFv) fragments. Other useful fragments are described in Hudson, Curr. Opin. Biotechnol. 9(4): 395-402 (1998).

[0402] The present invention also relates to antibody derivatives that bind specifically to one or more of the polypeptides of the present invention, to one or more of the polypeptides encoded by the isolated nucleic acid molecules of the present invention, or the binding of which can be competitively inhibited by one or more of the polypeptides of the present invention or one or more of the polypeptides encoded by the isolated nucleic acid molecules of the present invention.

[0403] Among such useful derivatives are chimeric, primatized, and humanized antibodies; such derivatives are less immunogenic in human beings, and thus are more suitable for in vivo administration, than are unmodified antibodies from non human mammalian species. Another useful method is PEGylation to increase the serum half life of the antibodies.

[0404] Chimeric antibodies typically include heavy and/or light chain variable regions (including both CDR and framework residues) of immunoglobulins of one species, typically mouse, fused to constant regions of another species, typically human. See, e.g., Morrison et al., Proc. Natl. Acad. Sci USA. 81(21): 6851-5 (1984); Sharon et al., Nature 309(5966): 364-7 (1984); Takeda et al., Nature 314(6010): 452-4 (1985); and U.S. Pat. No. 5,807,715 the disclosure of which is incorporated herein by reference in its entirety. Primatized and humanized antibodies typically include heavy and/or light chain CDRs from a murine antibody grafted into a non-human primate or human antibody V region framework, usually further comprising a human constant region, Riechmann et al., Nature 332(6162): 323-7 (1988); Co et al., Nature 351(6326): 501-2 (1991); and U.S. Pat. Nos. 6,054,297; 5,821,337; 5,770,196; 5,766,886; 5,821,123; 5,869,619; 6,180,377; 6,013,256; 5,693,761; and 6,180,370, the disclosures of which are incorporated herein by reference in their entireties. Other useful antibody derivatives of the invention include heteromeric antibody complexes and antibody fusions, such as diabodies (bispecific antibodies), single-chain diabodies, and intrabodies.

[0405] It is contemplated that the nucleic acids encoding the antibodies of the present invention can be operably joined to other nucleic acids forming a recombinant vector for cloning or for expression of the antibodies of the invention. Accordingly, the present invention includes any recombinant vector containing the coding sequences, or part thereof, whether for eukaryotic transduction, transfection or gene therapy. Such vectors may be prepared using conventional molecular biology techniques, known to those with skill in the art, and would comprise DNA encoding sequences for the immunoglobulin V-regions including framework and CDRs or parts thereof, and a suitable promoter either with or without a signal sequence for intracellular transport. Such vectors may be transduced or transfected into eukaryotic cells or used for gene therapy (Marasco et al., Proc. Natl. Acad. Sci. (USA) 90: 7889-7893 (1993); Duan et al., Proc. Natl. Acad. Sci. (USA) 91: 5075-5079 (1994), by conventional techniques, known to those with skill in the art.

[0406] The antibodies of the present invention, including fragments and derivatives thereof, can usefully be labeled. It is, therefore, another aspect of the present invention to provide labeled antibodies that bind specifically to one or more of the polypeptides of the present invention, to one or more of the polypeptides encoded by the isolated nucleic acid molecules of the present invention, or the binding of which can be competitively inhibited by one or more of the polypeptides of the present invention or one or more of the polypeptides encoded by the isolated nucleic acid molecules of the present invention. The choice of label depends, in part, upon the desired use.

[0407] For example, when the antibodies of the present invention are used for immunohistochemical staining of tissue samples, the label can usefully be an enzyme that catalyzes production and local deposition of a detectable product. Enzymes typically conjugated to antibodies to permit their immunohistochemical visualization are well known, and include alkaline phosphatase, β-galactosidase, glucose oxidase, horseradish peroxidase (HRP), and urease. Typical substrates for production and deposition of visually detectable products include o-nitrophenyl-beta-D-galactopyranoside (ONPG); o-phenylenediamine dihydrochloride (OPD); p-nitrophenyl phosphate (PNPP); p-nitrophenyl-beta-D-galactopryanoside (PNPG); 3′,3′-diaminobenzidine (DAB); 3-amino-9-ethylcarbazole (AEC); 4-chloro-1-naphthol (CN); 5-bromo-4-chloro-3-indolyl-phosphate (BCIP); ABTS®; BluoGal; iodonitrotetrarolium (INT); nitroblue tetrazolium chloride (NBT); phenazine methosulfate (PMS); phenolphthalein monophosphate (PMP); tetramethyl benzidine (TMB); tetranitroblue tetrazolium (TNBT); X-Gal; X-Gluc; and X-Glucoside.

[0408] Other substrates can be used to produce products for local deposition that are luminescent. For example, in the presence of hydrogen peroxide (H₂O₂), horseradish peroxidase (BRP) can catalyze the oxidation of cyclic diacylhydrazides, such as luminol. Immediately following the oxidation, the luminol is in an excited state (intermediate reaction product), which decays to the ground state by emitting light. Strong enhancement of the light emission is produced by enhancers, such as phenolic compounds. Advantages include high sensitivity, high resolution, and rapid detection without radioactivity and requiring only small amounts of antibody. See, e.g., Thorpe et al., Methods Enzymol. 133: 331-53 (1986); Kricka et al., J. Immunoassay 17(1): 67-83 (1996); and Lundqvist et al., J. Biolumin. Chemilumin. 10(6): 353-9 (1995). Kits for such enhanced chemiluminescent detection (ECL) are available commercially. The antibodies can also be labeled using colloidal gold.

[0409] As another example, when the antibodies of the present invention are used, e.g., for flow cytometric detection, for scanning laser cytometric detection, or for fluorescent immunoassay, they can usefully be labeled with fluorophores. There are a wide variety of fluorophore labels that can usefully be attached to the antibodies of the present invention. For flow cytometric applications, both for extracellular detection and for intracellular detection, common useful fluorophores can be fluorescein isothiocyanate (FITC), allophycocyanin (APC), R-phycoerythrin (PE), peridinin chlorophyll protein (PerCP), Texas Red, Cy3, Cy5, fluorescence resonance energy tandem fluorophores such as PerCP-Cy5.5, PE-Cy5, PE-Cy5.5, PE-Cy7, PE-Texas Red, and APC-Cy7.

[0410] Other fluorophores include, inter alia, Alexa Fluor® 350, Alexa Fluor® 488, Alexa Fluor® 532, Alexa Fluor® 546, Alexa Fluor® 568, Alexa Fluor® 594, Alexa Fluor® 647 (monoclonal antibody labeling kits available from Molecular Probes, Inc., Eugene, Oreg., USA), BODIPY dyes, such as BODIPY 493/503, BODIPY FL, BODIPY R6G, BODIPY 530/550, BODIPY TMR, BODIPY 558/568, BODIPY 558/568, BODIPY 564/570, BODIPY 576/589, BODIPY 581/591, BODIPY TR, BODIPY 630/650, BODIPY 650/665, Cascade Blue, Cascade Yellow, Dansyl, lissamine rhodamine B, Marina Blue, Oregon Green 488, Oregon Green 514, Pacific Blue, rhodamine 6G, rhodamine green, rhodamine red, tetramethylrhodamine, Texas Red (available from Molecular Probes, Inc., Eugene, Oreg., USA), and Cy2, Cy3, Cy3.5, Cy5, Cy5.5, Cy7, all of which are also useful for fluorescently labeling the antibodies of the present invention. For secondary detection using labeled avidin, streptavidin, captavidin or neutravidin, the antibodies of the present invention can usefully be labeled with biotin.

[0411] When the antibodies of the present invention are used, e.g., for western blotting applications, they can usefully be labeled with radioisotopes, such as ³³P, ³²P, ³⁵S, ³H, and ¹²⁵I. As another example, when the antibodies of the present invention are used for radioimmunotherapy, the label can usefully be ²²⁸Th, ²²⁷Ac, ²²⁵Ac, ²²³Ra, ²¹³Bi, ²¹²Pb, ²¹²Bi, ²¹¹At, ²⁰³Pb, ¹⁹⁴Os, ¹⁸⁸Re, ¹⁸⁶Re, ¹⁵³Sm, ¹⁴⁹Tb, ¹³¹I, ¹²⁵I, ¹¹¹In, ¹⁰⁵Rh, ^{99m}Tc, ⁹⁷Ru, ⁹⁰Y, ⁹⁰Sr, ⁸⁸Y, ⁷²Se, ⁶⁷Cu, or ⁴⁷Sc.

[0412] As another example, when the antibodies of the present invention are to be used for in vivo diagnostic use, they can be rendered detectable by conjugation to MRI contrast agents, such as gadolinium diethylenetriaminepentaacetic acid (DTPA), Lauffer et al., Radiology 207(2): 529-38 (1998), or by radioisotopic labeling.

[0413] As would be understood, use of the labels described above is not restricted to the application as for which they were mentioned.

[0414] The antibodies of the present invention, including fragments and derivatives thereof, can also be conjugated to toxins, in order to target the toxins ablative action to cells that display and/or express the polypeptides of the present invention. Commonly, the antibody in such immunotoxins is conjugated to Pseudomonas exotoxin A, diphtheria toxin, shiga toxin A, anthrax toxin lethal factor, or ricin. See Hall (ed.), Immunotoxin Methods and Protocols (Methods in Molecular Biology, vol. 166), Humana Press (2000); and Frankel et al. (eds.), Clinical Applications of Immunotoxins, Springer-Verlag (1998).

[0415] The antibodies of the present invention can usefully be attached to a substrate, and it is, therefore, another aspect of the invention to provide antibodies that bind specifically to one or more of the polypeptides of the present invention, to one or more of the polypeptides encoded by the isolated nucleic acid molecules of the present invention, or the binding of which can be competitively inhibited by one or more of the polypeptides of the present invention or one or more of the polypeptides encoded by the isolated nucleic acid molecules of the present invention, attached to a substrate. Substrates can be porous or nonporous, planar or nonplanar. For example, the antibodies of the present invention can usefully be conjugated to filtration media, such as NHS-activated Sepharose or CNBr-activated Sepharose for purposes of immunoaffinity chromatography. For example, the antibodies of the present invention can usefully be attached to paramagnetic microspheres, typically by biotin-streptavidin interaction, which microsphere can then be used for isolation of cells that express or display the polypeptides of the present invention. As another example, the antibodies of the present invention can usefully be attached to the surface of a microtiter plate for ELISA.

[0416] As noted above, the antibodies of the present invention can be produced in prokaryotic and eukaryotic cells. It is, therefore, another aspect of the present invention to provide cells that express the antibodies of the present invention, including hybridoma cells, B cells, plasma cells, and host cells recombinantly modified to express the antibodies of the present invention.

[0417] In yet a further aspect, the present invention provides aptamers evolved to bind specifically to one or more of the CaSPs of the present invention or to polypeptides encoded by the CaSNAs of the invention.

[0418] In sum, one of skill in the art, provided with the teachings of this invention, has available a variety of methods which may be used to alter the biological properties of the antibodies of this invention including methods which would increase or decrease the stability or half-life, immunogenicity, toxicity, affinity or yield of a given antibody molecule, or to alter it in any other way that may render it more suitable for a particular application.

Transgenic Animals and Cells

[0419] In another aspect, the invention provides transgenic cells and non-human organisms comprising nucleic acid molecules of the invention. In a preferred embodiment, the transgenic cells and non-human organisms comprise a nucleic acid molecule encoding a CaSP. In a preferred embodiment, the CaSP comprises an amino acid sequence selected from SEQ ID NO: 142-361, or a fragment, mutein, homologous protein or allelic variant thereof. In another preferred embodiment, the transgenic cells and non-human organism comprise a CaSNA of the invention, preferably a CaSNA comprising a nucleotide sequence selected from the group consisting of SEQ ID NO: 1-141, or a part, substantially similar nucleic acid molecule, allelic variant or hybridizing nucleic acid molecule thereof.

[0420] In another embodiment, the transgenic cells and non-human organisms have a targeted disruption or replacement of the endogenous orthologue of the human CaSG. The transgenic cells can be embryonic stem cells or somatic cells. The transgenic non-human organisms can be chimeric, nonchimeric heterozygotes, and nonchimeric homozygotes. Methods of producing transgenic animals are well known in the art. See, e.g., Hogan et al., Manipulating the Mouse Embryo: A Laboratory Manual 2d ed., Cold Spring Harbor Press (1999); Jackson et al., Mouse Genetics and Transgenics: A Practical Approach, Oxford University Press (2000); and Pinkert, Transgenic Animal Technology: A Laboratory Handbook, Academic Press (1999).

[0421] Any technique known in the art may be used to introduce a nucleic acid molecule of the invention into an animal to produce the founder lines of transgenic animals. Such techniques include, but are not limited to, pronuclear microinjection. (see, e.g., Paterson et al., Appl. Microbiol. Biotechnol. 40: 691-698 (1994); Carver et al., Biotechnology 11: 1263-1270 (1993); Wright et al., Biotechnology 9:830-834 (1991); and U.S. Pat. No. 4,873,191, herein incorporated by reference in its entirety), retrovirus-mediated gene transfer into germ lines, blastocysts or embryos (see, e.g., Van der Putten et al., Proc. Natl. Acad. Sci., USA 82: 6148-6152 (1985)); gene targeting in embryonic stem cells (see, e.g., Thompson et al., Cell 56: 313-321 (1989)); electroporation of cells or embryos (see, e.g., Lo, 1983, Mol. Cell. Biol. 3: 1803-1814 (1983)); introduction using a gene gun (see, e.g., Ulmer et al., Science 259: 1745-49 (1993); introducing nucleic acid constructs into embryonic pleuripotent stem cells and transferring the stem cells back into the blastocyst; and sperm-mediated gene transfer (see, e.g., Lavitrano et al., Cell 57: 717-723 (1989)).

[0422] Other techniques include, for example, nuclear transfer into enucleated oocytes of nuclei from cultured embryonic, fetal, or adult cells induced to quiescence (see, e.g., Campell et al., Nature 380: 64-66 (1996); Wilmut et al., Nature 385: 810-813 (1997)). The present invention provides for transgenic animals that carry the transgene (i.e., a nucleic acid molecule of the invention) in all their cells, as well as animals which carry the transgene in some, but not all their cells, i.e. e., mosaic animals or chimeric animals.

[0423] The transgene may be integrated as a single transgene or as multiple copies, such as in concatamers, e.g., head-to-head tandems or head-to-tail tandems. The transgene may also be selectively introduced into and activated in a particular cell type by following, e.g., the teaching of Lasko et al. et al, Proc. Natl. Acad. Sci. USA 89: 6232-6236 (1992). The regulatory sequences required for such a cell-type specific activation will depend upon the particular cell type of interest, and will be apparent to those of skill in the art.

[0424] Once transgenic animals have been generated, the expression of the recombinant gene may be assayed utilizing standard techniques. Initial screening may be accomplished by Southern blot analysis or PCR techniques to analyze animal tissues to verify that integration of the transgene has taken place. The level of mRNA expression of the transgene in the tissues of the transgenic animals may also be assessed using techniques which include, but are not limited to, Northern blot analysis of tissue samples obtained from the animal, in situ hybridization analysis, and reverse transcriptase-PCR (RT-PCR). Samples of transgenic gene-expressing tissue may also be evaluated immunocytochemically or immunohistochemically using antibodies specific for the transgene product.

[0425] Once the founder animals are produced, they may be bred, inbred, outbred, or crossbred to produce colonies of the particular animal. Examples of such breeding strategies include, are not limited to: outbreeding of founder animals with more than one integration site in order to establish separate lines, inbreeding of separate lines in order to produce compound transgenics that express the transgene at higher levels because of the effects of additive expression of each transgene; crossing of heterozygous transgenic animals to produce animals homozygous for a given integration site in order to both augment expression and eliminate the need for screening of animals by DNA analysis; crossing of separate homozygous lines to produce compound heterozygous or homozygous lines; and breeding to place the transgene on a distinct background that is appropriate for an experimental model of interest.

[0426] Transgenic animals of the invention have uses which include, but are not limited to, animal model systems useful in elaborating the biological function of polypeptides of the present invention, studying conditions and/or disorders associated with aberrant expression, and in screening for compounds effective in ameliorating such conditions and/or disorders.

[0427] Methods for creating a transgenic animal with a disruption of a targeted gene are also well known in the art. In general, a vector is designed to comprise some nucleotide sequences homologous to the endogenous targeted gene. The vector is introduced into a cell so that it may integrate, via homologous recombination with chromosomal sequences, into the endogenous gene, thereby disrupting the function of the endogenous gene. The transgene may also be selectively introduced into a particular cell type, thus inactivating the endogenous gene in only that cell type. See, e.g., Gu et al., Science 265: 103-106 (1994). The regulatory sequences required for such a cell-type specific inactivation will depend upon the particular cell type of interest, and will be apparent to those of skill in the art. See, e.g., Smithies et al., Nature 317: 230-234 (1985); Thomas et al., Cell 51: 503-512 (1987); Thompson et al., Cell 5: 313-321 (1989).

[0428] In one embodiment, a mutant, non-functional nucleic acid molecule of the invention (or a completely unrelated DNA sequence) flanked by DNA homologous to the endogenous nucleic acid sequence (either the coding regions or regulatory regions of the gene) can be used, with or without a selectable marker and/or a negative selectable marker, to transfect cells that express polypeptides of the invention in vivo. In another embodiment, techniques known in the art are used to generate knockouts in cells that contain, but do not express the gene of interest. Insertion of the DNA construct, via targeted homologous recombination, results in inactivation of the targeted gene. Such approaches are particularly suited in research and agricultural fields where modifications to embryonic stem cells can be used to generate animal offspring with an inactive targeted gene. See, e.g., Thomas, supra and Thompson, supra. However this approach can be routinely adapted for use in humans provided the recombinant DNA constructs are directly administered or targeted to the required site in vivo using appropriate viral vectors that will be apparent to those of skill in the art a

[0429] In further embodiments of the invention, cells that are genetically engineered to express the polypeptides of the invention, or alternatively, that are genetically engineered not to express the polypeptides of the invention (e.g., knockouts) are administered to a patient in vivo. Such cells may be obtained from an animal or patient or an MHC compatible donor and can include, but are not limited to fibroblasts, bone marrow cells, blood cells (e.g., lymphocytes), adipocytes, muscle cells, endothelial cells etc. The cells are genetically engineered in vitro using recombinant DNA techniques to introduce the coding sequence of polypeptides of the invention into the cells, or alternatively, to disrupt the coding sequence and/or endogenous regulatory sequence associated with the polypeptides of the invention, e.g., by transduction (using viral vectors, and preferably vectors that integrate the transgene into the cell genome) or transfection procedures, including, but not limited to, the use of plasmids, cosmids, YACs, naked DNA, electroporation, liposomes, etc.

[0430] The coding sequence of the polypeptides of the invention can be placed under the control of a strong constitutive or inducible promoter or promoter/enhancer to achieve expression, and preferably secretion, of the polypeptides of the invention. The engineered cells which express and preferably secrete the polypeptides of the invention can be introduced into the patient systemically, e.g., in the circulation, or intraperitoneally.

[0431] Alternatively, the cells can be incorporated into a matrix and implanted in the body, e.g., genetically engineered fibroblasts can be implanted as part of a skin graft; genetically engineered endothelial cells can be implanted as part of a lymphatic or vascular graft. See, e.g., U.S. Pat. Nos. 5,399,349 and 5,460,959, each of which is incorporated by reference herein in its entirety.

[0432] When the cells to be administered are non-autologous or non-MHC compatible cells, they can be administered using well known techniques which prevent the development of a host immune response against the introduced cells. For example, the cells may be introduced in an encapsulated form which, while allowing for an exchange of components with the immediate extracellular environment, does not allow the introduced cells to be recognized by the host immune system.

[0433] Transgenic and “knock-out” animals of the invention have uses which include, but are not limited to, animal model systems useful in elaborating the biological function of polypeptides of the present invention, studying conditions and/or disorders associated with aberrant expression, and in screening for compounds effective in ameliorating such conditions and/or disorders.

Computer Readable Means

[0434] A further aspect of the invention is a computer readable means for storing the nucleic acid and amino acid sequences of the instant invention. In a preferred embodiment, the invention provides a computer readable means for storing SEQ ID NO: 142-361 and SEQ ID NO: 1-141 as described herein, as the complete set of sequences or in any combination. The records of the computer readable means can be accessed for reading and display and for interface with a computer system for the application of programs allowing for the location of data upon a query for data meeting certain criteria, the comparison of sequences, the alignment or ordering of sequences meeting a set of criteria, and the like.

[0435] The nucleic acid and amino acid sequences of the invention are particularly useful as components in databases useful for search analyses as well as in sequence analysis algorithms. As used herein, the terms “nucleic acid sequences of the invention” and “amino acid sequences of the invention” mean any detectable chemical or physical characteristic of a polynucleotide or polypeptide of the invention that is or may be reduced to or stored in a computer readable form. These include, without limitation, chromatographic scan data or peak data, photographic data or scan data therefrom, and mass spectrographic data.

[0436] This invention provides computer readable media having stored thereon sequences of the invention. A computer readable medium may comprise one or more of the following: a nucleic acid sequence comprising a sequence of a nucleic acid sequence of the invention; an amino acid sequence comprising an amino acid sequence of the invention, a set of nucleic acid sequences wherein at least one of said sequences comprises the sequence of a nucleic acid sequence of the invention; a set of amino acid sequences wherein at least one of said sequences comprises the sequence of an amino acid sequence of the invention; a data set representing a nucleic acid sequence comprising the sequence of one or more nucleic acid sequences of the invention; a data set representing a nucleic acid sequence encoding, an amino acid sequence comprising the sequence of an amino acid sequence of the invention; a set of nucleic acid sequences wherein at least one of said sequences comprises the sequence of a nucleic acid sequence of the invention; a set of amino acid sequences wherein at least one of said sequences comprises the sequence of an amino acid sequence of the invention; a data set representing a nucleic acid sequence comprising the sequence of a nucleic acid sequence of the invention; a data set representing a nucleic acid sequence encoding an amino acid sequence comprising the sequence of an amino acid sequence of the invention. The computer readable medium can be any composition of matter used to store information or data, including, for example, commercially available floppy disks, tapes, hard drives, compact disks, and video disks.

[0437] Also provided by the invention are methods for the analysis of character sequences, particularly genetic sequences. Preferred methods of sequence analysis include, for example, methods of sequence homology analysis, such as identity and similarity analysis, RNA structure analysis, sequence assembly, cladistic analysis, sequence motif analysis, open reading frame determination, nucleic acid base calling, and sequencing chromatogram peak analysis.

[0438] A computer-based method is provided for performing nucleic acid sequence identity or similarity identification. This method comprises the steps of providing a nucleic acid sequence comprising the sequence of a nucleic acid of the invention in a computer readable medium; and comparing said nucleic acid sequence to at least one nucleic acid or amino acid sequence to identify sequence identity or similarity.

[0439] A computer-based method is also provided for performing amino acid homology identification, said method comprising the steps of: providing an amino acid sequence comprising the sequence of an amino acid of the invention in a computer readable medium; and comparing said amino acid sequence to at least one nucleic acid or an amino acid sequence to identify homology.

[0440] A computer-based method is still further provided for assembly of overlapping nucleic acid sequences into a single nucleic acid sequence, said method comprising the steps of: providing a first nucleic acid sequence comprising the sequence of a nucleic acid of the invention in a computer readable medium; and screening for at least one overlapping region between said first nucleic acid sequence and a second nucleic acid sequence. In addition, the invention includes a method of using patterns of expression associated with either the nucleic acids or proteins in a computer-based method to diagnose disease.

Diagnostic Methods for Breast, Colon, Lung, ovarian or Prostate Cancer

[0441] The present invention also relates to quantitative and qualitative diagnostic assays and methods for detecting, diagnosing, monitoring, staging and predicting cancers by comparing expression of a CaSNA or a CaSP in a human patient that has or may have breast, colon, lung, ovarian or prostate cancer, or who is at risk of developing breast, colon, lung, ovarian or prostate cancer, with the expression of a CaSNA or a CaSP in a normal human control. For purposes of the present invention, “expression of a CaSNA” or “CaSNA expression” means the quantity of CaSNA mRNA that can be measured by any method known in the art or the level of transcription that can be measured by any method known in the art in a cell, tissue, organ or whole patient. Similarly, the term “expression of a CaSP” or “CaSP expression” means the amount of CaSP that can be measured by any method known in the art or the level of translation of a CaSNA that can be measured by any method known in the art.

[0442] The present invention provides methods for diagnosing breast, colon, lung, ovarian or prostate cancer in a patient, by analyzing for changes in levels of CaSNA or CaSP in cells, tissues, organs or bodily fluids compared with levels of CaSNA or CaSP in cells, tissues, organs or bodily fluids of preferably the same type from a normal human control, wherein an increase, or decrease in certain cases, in levels of a CaSNA or CaSP in the patient versus the normal human control is associated with the presence of breast, colon, lung, ovarian or prostate cancer or with a predilection to the disease. In another preferred embodiment, the present invention provides methods for diagnosing breast, colon, lung, ovarian or prostate cancer in a patient by analyzing changes in the structure of the mRNA of a CaSG compared to the mRNA from a normal control. These changes include, without limitation, aberrant splicing, alterations in polyadenylation and/or alterations in 5′ nucleotide capping. In yet another preferred embodiment, the present invention provides methods for diagnosing breast, colon, lung, ovarian or prostate cancer in a patient by analyzing changes in a CaSP compared to a CaSP from a normal patient. These changes include, e.g., alterations, including post translational modifications such as glycosylation and/or phosphorylation of the CaSP or changes in the subcellular CaSP localization.

[0443] The present invention provides methods for diagnosing colon cancer in a patient, in particular adenocarcinoma, by analyzing for changes in levels of CaSNA or CaSP in cells, tissues, organs or bodily fluids compared with levels of CaSNA or CaSP in cells, tissues, organs or bodily fluids of preferably the same type from a normal human control, wherein an increase, or decrease in certain cases, in levels of a CaSNA or CaSP in the patient versus the normal human control is associated with the presence of colon cancer or with a predilection to the disease. In another preferred embodiment, the present invention provides methods for diagnosing colon cancer in a patient by analyzing changes in the structure of the mRNA of a CaSG compared to the mRNA from a normal control. These changes include, without limitation, aberrant splicing, alterations in polyadenylation and/or alterations in 5′ nucleotide capping. In yet another preferred embodiment, the present invention provides methods for diagnosing colon cancer in a patient by analyzing changes in a CaSP compared to a CaSP from a normal patient. These changes include, e.g., alterations, including post translational modifications such as glycosylation and/or phosphorylation of the CaSP or changes in the subcellular CaSP localization.

[0444] The present invention provides methods for diagnosing lung cancer in a patient, in particular adeno- or squamous cell carcinoma, by analyzing for changes in levels of CaSNA or CaSP in cells, tissues, organs or bodily fluids compared with levels of CaSNA or CaSP in cells, tissues, organs or bodily fluids of preferably the same type from a normal human control, wherein an increase, or decrease in certain cases, in levels of a CaSNA or CaSP in the patient versus the normal human control is associated with the presence of lung cancer or with a predilection to the disease. In another preferred embodiment, the present invention provides methods for diagnosing lung cancer in a patient by analyzing changes in the structure of the mRNA of an CaSG compared to the mRNA from a normal control. These changes include, without limitation, aberrant splicing, alterations in polyadenylation and/or alterations in 5′ nucleotide capping. In yet another preferred embodiment, the present invention provides methods for diagnosing lung cancer in a patient by analyzing changes in a CaSP compared to a CaSP from a normal patient. These changes include, e.g., alterations, including posttranslational modifications such as glycosylation and/or phosphorylation of the CaSP or changes in the subcellular CaSP localization.

[0445] For purposes of the present invention diagnosing means that CaSNA or CaSP levels are used to determine the presence or absence of disease in a patient. As will be understood by those of skill in the art, measurement of other diagnostic parameters may be required for definitive diagnosis or determination of the appropriate treatment for the disease. The determination may be made by a clinician, a doctor, a testing laboratory, or a patient using an over the counter test. The patient may have symptoms of disease or may be asymptomatic. In addition, the CaSNA or CaSP levels of the present invention may be used as screening marker to determine whether further tests or biopsies are warranted. In addition, the CaSNA or CaSP levels may be used to determine the vulnerability or susceptibility to disease.

[0446] In a preferred embodiment, the expression of a CaSNA is measured by determining the amount of a mRNA that encodes an amino acid sequence selected from SEQ ID NO: 142-361, a homolog, an allelic variant, or a fragment thereof. In a more preferred embodiment, the CaSNA expression that is measured is the level of expression of a CaSNA mRNA selected from SEQ ID NO: 1-141, or a hybridizing nucleic acid, homologous nucleic acid or allelic variant thereof, or a part of any of these nucleic acid molecules. CaSNA expression may be measured by any method known in the art, such as those described supra, including measuring mRNA expression by Northern blot, quantitative or qualitative reverse transcriptase PCR (RT-PCR), microarray, dot or slot blots or in situ hybridization. See, e.g., Ausubel (1992), supra; Ausubel (1999), supra; Sambrook (1989), supra; and Sambrook (2001), supra. CaSNA transcription may be measured by any method known in the art including using a reporter gene hooked up to the promoter of a CaSG of interest or doing nuclear run-off assays. Alterations in mRNA structure, e.g., aberrant splicing variants, may be determined by any method known in the art, including, RT-PCR followed by sequencing or restriction analysis. As necessary, CaSNA expression may be compared to a known control, such as a normal breast, colon, lung, ovarian or prostate nucleic acid, to detect a change in expression.

[0447] In another preferred embodiment, the expression of a CaSP is measured by determining the level of a CaSP having an amino acid sequence selected from the group consisting of SEQ ID NO: 142-361, a homolog, an allelic variant, or a fragment thereof. Such levels are preferably determined in at least one of cells, tissues, organs and/or bodily fluids, including determination of normal and abnormal levels. Thus, for instance, a diagnostic assay in accordance with the invention for diagnosing over- or underexpression of a CaSNA or CaSP compared to normal control bodily fluids, cells, or tissue samples may be used to diagnose the presence of breast, colon, lung, ovarian or prostate cancer. The expression level of a CaSP ma be determined by any method known in the art, such as those described supra. In a preferred embodiment, the CaSP expression level may be determined by radioimmunoassays, competitive-binding assays, ELISA, Western blot, FACS, immunohistochemistry, immunoprecipitation, proteomic approaches: two-dimensional gel electrophoresis (2D electrophoresis) and non-gel-based approaches such as mass spectrometry or protein interaction profiling. See, e.g, Harlow (1999), supra; Ausubel (1992), supra; and Ausubel (1999), supra. Alterations in the CaSP structure may be determined by any method known in the art, including, e.g., using antibodies that specifically recognize phosphoserine, phosphothreonine or phosphotyrosine residues, two-dimensional polyacrylamide gel electrophoresis (2D PAGE) and/or chemical analysis of amino acid residues of the protein. Id.

[0448] In a preferred embodiment, a radioimmunoassay (RIA) or an ELISA is used. An antibody specific to a CaSP is prepared if one is not already available. In a preferred embodiment, the antibody is a monoclonal antibody. The anti-CaSP antibody is bound to a solid support and any free protein binding sites on the solid support are blocked with a protein such as bovine serum albumin. A sample of interest is incubated with the antibody on the solid support under conditions in which the CaSP will bind to the anti-CaSP antibody. The sample is removed, the solid support is washed to remove unbound material, and an anti-CaSP antibody that is linked to a detectable reagent (a radioactive substance for RIA and an enzyme for ELISA) is added to the solid support and incubated under conditions in which binding of the CaSP to the labeled antibody will occur. After binding, the unbound labeled antibody is removed by washing. For an ELISA, one or more substrates are added to produce a colored reaction product that is based upon the amount of an CaSP in the sample. For an RIA, the solid support is counted for radioactive decay signals by any method known in the art. Quantitative results for both RIA and ELISA typically are obtained by reference to a standard curve.

[0449] Other methods to measure CaSP levels are known in the art. For instance, a competition assay may be employed wherein an anti-CaSP antibody is attached to a solid support and an allocated amount of a labeled CaSP and a sample of interest are incubated with the solid support. The amount of labeled CaSP attached to the solid support can be correlated to the quantity of a CaSP in the sample.

[0450] Of the proteomic approaches, 2D PAGE is a well known technique. Isolation of individual proteins from a sample such, as serum is accomplished using sequential separation of proteins by isoelectric point and molecular weight. Typically, polypeptides are first separated by isoelectric point (the first dimension) and then separated by size using an electric current (the second dimension). In general, the second dimension is perpendicular to the first dimension. Because no two proteins with different sequences are identical on the basis of both size and charge, the result of 2D PAGE is a roughly square gel in which each protein occupies a unique spot. Analysis of the spots with chemical or antibody probes, or subsequent protein microsequencing can reveal the relative abundance of a given protein and the identity of the proteins in the sample.

[0451] Expression levels of a CaSNA can be determined by any method known in the art, including PCR and other nucleic acid methods, such as ligase chain reaction (LCR) and nucleic acid sequence based amplification (NASBA), can be used to detect malignant cells for diagnosis and monitoring of various malignancies. For example, reverse-transcriptase PCR (RT-PCR) is a powerful technique which can be used to detect the presence of a specific mRNA population in a complex mixture of thousands of other mRNA species. In RT-PCR, an mRNA species is first reverse transcribed to complementary DNA (cDNA) with use of the enzyme reverse transcriptase; the cDNA is then amplified as in a standard PCR reaction.

[0452] Hybridization to specific DNA molecules (e.g., oligonucleotides) arrayed on a solid support can be used to both detect the expression of and quantitate the level of expression of one or more CaSNAs of interest. In this approach, all or a portion of one or more CaSNAs is fixed to a substrate. A sample of interest, which may comprise RNA, e.g., total RNA or polyA-selected mRNA, or a complementary DNA (cDNA) copy of the RNA is incubated with the solid support under conditions in which hybridization will occur between the DNA on the solid support and the nucleic acid molecules in the sample of interest. Hybridization between the substrate-bound DNA and the nucleic acid molecules in the sample can be detected and quantitated by several means, including, without limitation, radioactive labeling or fluorescent labeling of the nucleic acid molecule or a secondary molecule designed to detect the hybrid.

[0453] The above tests can be carried out on samples derived from a variety of cells, bodily fluids and/or tissue extracts such as homogenates or solubilized tissue obtained from a patient. Tissue extracts are obtained routinely from tissue biopsy and autopsy material. Bodily fluids useful in the present invention include blood, urine, saliva or any other bodily secretion or derivative thereof. As used herein “blpod” includes whole blood, plasma, serum, circulating epithelial cells, constituents, or any derivative of blood.

[0454] In addition to detection in bodily fluids, the proteins and nucleic acids of the invention are suitable to detection by cell capture technology. Whole cells may be captured by a variety methods for example magnetic separation, U.S. Pat. Nos. 5,200,084; 5,186,827; 5,108,933; 4,925,788, the disclosures of which are incorporated herein by reference in their entireties. Epithelial cells may be captured using such products as Dynabeads® or CELLection™ (Dynal Biotech, Oslo, Norway). Alternatively, fractions of blood may be captured, e.g., the buffy coat fraction (50 mm cells isolated from 5 ml of blood) containing epithelial cells. In addition, cancer cells may be captured using the techniques described in WO 00/47998, the disclosure of which is incorporated herein by reference in its entirety. Once the cells are captured or concentrated, the proteins or nucleic acids are detected by the means described in the subject application. Alternatively, nucleic acids may be captured directly from blood samples, see U.S. Pat. Nos. 6,156,504, 5,501,963; or WO 01/42504, the disclosures of which are incorporated herein by reference in their entireties.

[0455] In a preferred embodiment, the specimen tested for expression of CaSNA or CaSP includes without limitation normal or cancerous breast, colon, lung, ovarian or prostate tissue, normal or cancerous breast, colon, lung, ovarian or prostate cells grown in cell culture, blood, serum, lymph node tissue, and lymphatic fluid. In another preferred embodiment, especially when metastasis of a primary breast, colon, lung, ovarian or prostate cancer is known or suspected, specimens include, without limitation, tissues from brain, bone, bone marrow, liver, lungs, colon, and adrenal glands. In general, the tissues may be sampled by biopsy, including, without limitation, needle biopsy, e.g., transthoracic needle aspiration, cervical mediatinoscopy, endoscopic lymph node biopsy, video-assisted thoracoscopy, exploratory thoracotomy, bone marrow biopsy and bone marrow aspiration.

[0456] All the methods of the present invention may optionally include determining the expression levels of one or more other cancer markers in addition to determining the expression level of a CaSNA or CaSP. In many cases, the use of another cancer marker will decrease the likelihood of false positives or false negatives. In one embodiment, the one or more other cancer markers include other CaSNA or CaSPs as disclosed herein. Other cancer markers useful in the present invention will depend on the cancer being tested and are known to those of skill in the art. In a preferred embodiment, at least one other cancer marker in addition to a particular CaSNA or CaSP is measured. In a more preferred embodiment, at least two other additional cancer markers are used. In an even more preferred embodiment, at least three, more preferably at least five, even more preferably at least ten additional cancer markers are used.

[0457] In a preferred embodiment, the specimen tested for expression of CaSNA or CaSP includes without limitation colon tissue, fecal samples, colonocytes, colon cells grown in cell culture, blood, serum, lymph node tissue, and lymphatic fluid. In another preferred embodiment, especially when metastasis of a primary colon cancer is known or suspected, specimens include, without limitation, tissues from brain, bone, bone marrow, liver, lungs, and adrenal glands. In general, the tissues may be sampled by biopsy, including, without limitation, needle biopsy, e.g., transthoracic needle aspiration, cervical mediatinoscopy, endoscopic lymph node biopsy, video-assisted thoracoscopy, exploratory thoracotomy, bone marrow biopsy and bone marrow aspiration.

[0458] Colonocytes represent an important source of the CaSP or CaSNAs because they provide a picture of the immediate past metabolic history of the GI tract of a subject. In addition, such cells are representative of the cell population from a statistically large sampling frame reflecting the state of the colonic mucosa along the entire length of the colon in a non-invasive manner, in contrast to a limited sampling by colonic biopsy using an invasive procedure involving endoscopy. Specific examples of patents describing the isolatation colonocytes include U.S. Pat. Nos. 6,335,193; 6,020,137 5,741,650; 6,258,541; US 2001 0026925 A1; WO 00/63358 A1, the disclosures of which are incorporated herein by reference in their entireties.

[0459] All the methods of the present invention may optionally include determining the expression levels of one or more other cancer markers in addition to determining the expression level of a CaSNA or CaSP. In many cases, the use of another cancer marker will decrease the likelihood of false positives or false negatives. In one embodiment, the one or more other cancer markers include other CaSNA or CaSPs as disclosed herein. Other cancer markers useful in the present invention will depend on the cancer being tested and are known to those of skill in the art. In a preferred embodiment, at least one other cancer marker in addition to a particular CaSNA or CaSP is measured. In a more preferred embodiment, at least two other additional cancer markers are used. In an even more preferred embodiment, at least three, more preferably at least five even more preferably at least ten additional cancer markers are used.

[0460] In a preferred embodiment, the specimen tested for expression of CaSNA or CaSP includes, without limitation, Lung tissue, fluid obtained by bronchial alveolar lavage (BAL), sputum, Lung cells grown in cell culture, blood, serum, lymph node tissue and lymphatic fluid. In another preferred embodiment, especially when metastasis of a primary Lung cancer is known or suspected, specimens include, without limitation, tissues from brain, bone, bone marrow, liver, adrenal glands and colon. In general, the tissues may be sampled by biopsy, including, without limitation, needle biopsy, e.g., transthoracic needle aspiration, cervical mediatinoscopy, endoscopic lymph node biopsy, video-assisted thoracoscopy, exploratory thoracotomy, bone marrow biopsy and bone marrow aspiration. See Scott, supra and Franklin, pp. 529-570, in Kane, supra. For early and inexpensive detection, assaying for changes in CaSNAs or CaSPs in cells in sputum samples may be particularly useful. Methods of obtaining and analyzing sputum samples are disclosed in Franklin, supra.

[0461] All the methods of the present invention may optionally include determining the expression levels of one or more other cancer markers in addition to determining the expression level of a CaSNA or CaSP. In many cases, the use of another cancer marker will decrease the likelihood of false positives or false negatives. In one embodiment, the one or more other cancer markers include other CaSNA or CaSPs as disclosed herein. Other cancer markers useful in the present invention will depend on the cancer being tested and are known to those of skill in the art. In a preferred embodiment, at least one other cancer marker in addition to a particular CaSNA or CaSP is measured. In a more preferred embodiment, at least two other additional cancer markers are used. In an even more preferred embodiment, at least three, more preferably at least five, even more preferably at least ten additional cancer markers are used.

[0462] For prostate cancer, the progress of therapy can be assessed by routine methods, usually by measuring serum PSA (prostate specific antigen) levels; the higher the level of PSA in the blood, the more extensive the cancer.

[0463] Commercial assays for detecting PSA are available, e.g, Hybitech Tandem-E and Tandem-R PSA assay kits, the Yang ProsCheck polyclonal assay (Yang Labs, Bellevue, Wash.), Abbott Imx (Abbott Labs, Abbott Park, Ill.), etc. Metastasis can be determined by staging tests and by bone scan and tests for calcium level and other enzymes to determine spread to the bone, CT scans can also be done to look for spread to the pelvis and lymph nodes in the area. Chest X-rays and measurement of liver enzyme levels by known methods are used to look for metastasis to the lungs and liver, respectively. Other routine methods for monitoring the disease include transrectal ultrasonography (TRUS) and transrectal needle biopsy (TRNB).

[0464] For bladder cancer, which is a more localized cancer, methods to determine progress of disease include urinary cytologic evaluation by cystoscopy, monitoring for presence of blood in the urine, visualization of the urothelial tract by sonography or an intravenous pyelogram, computed tomography (CT) and magnetic resonance imaging (MRI). The presence of distant metastases can be assessed by CT of the abdomen, chest x-rays, or radionuclide imaging of the skeleton.

[0465] Diagnosing

[0466] In one aspect, the invention provides a method for determining the expression levels and/or structural alterations of one or more CaSNA and/or CaSP in a sample from a patient suspected of having breast, colon, lung, ovarian or prostate cancer. In general, the method comprises the steps of obtaining the sample from the patient, determining the expression level or structural alterations of a CaSNA and/or CaSP and then ascertaining whether the patient has breast, colon, lung, ovarian or prostate cancer from the expression level of the CaSNA or CaSP. In general, if high expression relative to a control of a CaSNA or CaSP is indicative of breast, colon, lung, ovarian or prostate cancer, a diagnostic assay is considered positive if the level of expression of the CaSNA or CaSP is at least one and a half times higher, and more preferably are at least two times higher, still more preferably five times higher, even more preferably at least ten times higher, than in preferably the same cells, tissues or bodily fluid of a normal human control. In contrast, if low expression relative to a control of a CaSNA or CaSP is indicative of breast, colon, lung, ovarian or prostate cancer, a diagnostic assay is considered positive if the level of expression of the CaSNA or CaSP is at least one and a half times lower, and more preferably are at least two times lower, still more preferably five times lower, even more preferably at least ten times lower than in preferably the same cells, tissues or bodily fluid of a normal human control. The normal human control may be from a different patient or from uninvolved tissue of the same patient.

[0467] The present invention also provides a method of determining whether breast, colon, lung, ovarian or prostate cancer has metastasized in a patient. One may identify whether the breast, colon, lung, ovarian or prostate cancer has metastasized by measuring the expression levels and/or structural alterations of one or more CaSNAs and/or CaSPs in a variety of tissues. The presence of a CaSNA or CaSP in a certain tissue at levels higher than that of corresponding noncancerous tissue (e.g., the same tissue from another individual) is indicative of metastasis if high level expression of a CaSNA or CaSP is associated with breast, colon, lung, ovarian or prostate cancer. Similarly, the presence of a CaSNA or CaSP in a tissue at levels lower than that of corresponding noncancerous tissue is indicative of metastasis if low level expression of a CaSNA or CaSP is associated with breast, colon, lung, ovarian or prostate cancer. Further, the presence of a structurally altered CaSNA or CaSP that is associated with breast, colon, lung, ovarian or prostate cancer is also indicative of metastasis.

[0468] In general, if high expression relative to a control of a CaSNA or CaSP is indicative of metastasis, an assay for metastasis is considered positive if the level of expression of the CaSNA or CaSP is at least one and a half times higher, and more preferably are at least two times higher, still more preferably five times higher, even more preferably at least ten times higher, than in preferably the same cells, tissues or bodily fluid of a normal human control. In contrast, if low expression relative to a control of a CaSNA or CaSP is indicative of metastasis, an assay for metastasis is considered positive if the level of expression of the CaSNA or CaSP is at least one and a half times lower, and more preferably are at least two times lower, still more preferably five times lower, even more preferably at least ten times lower than in preferably the same cells, tissues or bodily fluid of a normal human control.

[0469] Staging

[0470] The invention also provides a method of staging breast, colon, lung, ovarian or prostate cancer in a human patient. The method comprises identifying a human patient having breast, colon, lung, ovarian or prostate cancer and analyzing cells, tissues or bodily fluids from such human patient for expression levels and/or structural alterations of one or more CaSNAs or CaSPs. First, one or more tumors from a variety of patients are staged according to procedures well known in the art, and the expression levels of one or more CaSNAs or CaSPs is determined for each stage to obtain a standard expression level for each CaSNA and CaSP. Then, the CaSNA or CaSP expression levels of the CaSNA or CaSP are determined in a biological sample from a patient whose stage of cancer is not known. The CaSNA or CaSP expression levels from the patient are then compared to the standard expression/level. By comparing the expression level of the CaSNAs and CaSPs from the patient to the standard expression levels, one may determine the stage of the tumor. The same procedure may be followed using structural alterations of a CaSNA or CaSP to determine the stage of a breast, colon, lung, ovarian or prostate cancer.

[0471] Monitoring

[0472] Further provided is a method of monitoring breast, colon, lung, ovarian or prostate cancer in a human patient. One may monitor a human patient to determine whether there has been metastasis and, if there has been, when metastasis began to occur. One may also monitor a human patient to determine whether a preneoplastic lesion has become cancerous. One may also monitor a human patient to determine whether a therapy, e.g., chemotherapy, radiotherapy or surgery, has decreased or eliminated the breast, colon, lung, ovarian or prostate cancer. The monitoring may determine if there has been a reoccurrence and, if so, determine its nature. The method comprises identifying a human patient that one wants to monitor for breast, colon, lung, ovarian or prostate cancer, periodically analyzing cells, tissues or bodily fluids from such human patient for expression levels of one or more CaSNAs or CaSPs, and comparing the CaSNA or CaSP levels over time to those CaSNA or CaSP expression levels obtained previously. Patients may also be monitored by measuring one or more structural alterations in a CaSNA or CaSP that are associated with breast, colon, lung, ovarian or prostate cancer.

[0473] If increased expression of a CaSNA or CaSP is associated with metastasis, treatment failure, or conversion of a preneoplastic lesion to a cancerous lesion, then detecting an increase in the expression level of a CaSNA or CaSP indicates that the tumor is metastasizing, that treatment has failed or that the lesion is cancerous, respectively. One having ordinary skill in the art would recognize that if this were the case, then a decreased expression level would be indicative of no metastasis, effective therapy or failure to progress to a neoplastic lesion. If decreased expression of a CaSNA or CaSP is associated with metastasis, treatment failure, or conversion of a preneoplastic lesion to a cancerous lesion, then detecting a decrease in the expression level of a CaSNA or CaSP indicates that the tumor is metastasizing, that treatment has failed or that the lesion is cancerous, respectively. In a preferred embodiment, the levels of CaSNAs or CaSPs are determined from the same cell type, tissue or bodily fluid as prior patient samples. Monitoring a patient for onset of breast, colon, lung, ovarian or prostate cancer metastasis is periodic and preferably is done on a quarterly basis, but may be done more or less frequently.

[0474] The methods described herein can further be utilized as prognostic assays to identify subjects having or at risk of developing a disease or disorder associated with increased or decreased expression levels of a CaSNA and/or CaSP. The present invention provides a method in which a test sample is obtained from a human patient and one or more CaSNAs and/or CaSPs are detected. The presence of higher (or lower) CaSNA or CaSP levels as compared to normal human controls is diagnostic for the human patient being at risk for developing cancer, particularly breast, colon, lung, ovarian or prostate cancer. The effectiveness of therapeutic agents to decrease (or increase) expression or activity of one or more CaSNAs and/or CaSPs of the invention can also be monitored by analyzing levels of expression of the CaSNAs and/or CaSPs in a human patient in clinical trials or in in vitro screening assays such as in human cells. In this way, the gene expression pattern can serve as a marker, indicative of the physiological response of the human patient or cells, as the case may be, to the agent being tested.

[0475] Detection of Genetic Lesions or Mutations

[0476] The methods of the present invention can also be used to detect genetic lesions or mutations in a CaSG, thereby determining if a human with the genetic lesion is susceptible to developing breast, colon, lung, ovarian or prostate cancer or to determine what genetic lesions are responsible, or are partly responsible, for a person's existing breast, colon, lung, ovarian or prostate cancer. Genetic lesions can be detected, for example, by ascertaining the existence of a deletion, insertion and/or substitution of one or more nucleotides from the CaSGs of this invention, a chromosomal rearrangement of a CaSG, an aberrant modification of a CaSG (such as of the methylation pattern of the genomic DNA), or allelic loss of a CaSG. Methods to detect such lesions in the CaSG of this invention are known to those having ordinary skill in the art following the teachings of the specification.

Methods of Detecting Noncancerous Breast, Colon, Lung, Ovarian or Prostate Diseases

[0477] The present invention also provides methods for determining the expression levels and/or structural alterations of one or more CaSNAs and/or CaSPs in a sample from a patient suspected of having or known to have a noncancerous breast, colon, lung, ovarian or prostate disease. In general, the method comprises the steps of obtaining a sample from the patient, determining the expression level or structural alterations of a CaSNA and/or CaSP, comparing the expression level or structural alteration of the CaSNA or CaSP to a normal breast, colon, lung, ovarian or prostate control, and then ascertaining whether the patient has a noncancerous breast, colon, lung, ovarian or prostate-disease. In general, if high expression relative to a control of a CaSNA or CaSP is indicative of a particular noncancerous breast, colon, lung, ovarian or prostate disease, a diagnostic assay is considered positive if the level of expression of the CaSNA or CaSP is at least two times higher, and more preferably are at least five times higher, even more preferably at least ten times higher, than in preferably the same cells, tissues or bodily fluid of a normal human control. In contrast, if low expression relative to a control of a CaSNA or CaSP is indicative of a noncancerous breast, colon, lung, ovarian or prostate disease, a diagnostic assay is considered positive if the level of expression of the CaSNA or CaSP is at least two times lower, more preferably are at least five times lower, even more preferably at least ten times lower than in preferably the same cells, tissues or bodily fluid of a normal human control. The normal human control may be from a different patient or from uninvolved tissue of the same patient.

[0478] One having ordinary skill in the art may determine whether a CaSNA and/or CaSP is associated with a particular noncancerous breast, colon, lung, ovarian or prostate disease by obtaining breast, colon, lung, ovarian or prostate tissue from a patient having a noncancerous breast, colon, lung, ovarian or prostate disease of interest and determining which CaSNAs and/or CaSPs are expressed in the tissue at either a higher or a lower level than in normal breast, colon, lung, ovarian or prostate tissue. In another embodiment, one may determine whether a CaSNA or CaSP exhibits structural alterations in a particular noncancerous breast, colon, lung, ovarian or prostate disease state by obtaining breast, colon, lung, ovarian or prostate tissue from a patient having a noncancerous breast, colon, lung, ovarian or prostate disease of interest and determining the structural alterations in one or more CaSNAs and/or CaSPs relative to normal breast, colon, lung, ovarian or prostate tissue.

Methods for Identifying Breast, Colon, Lung, Ovarian or Prostate Tissue

[0479] In another aspect, the invention provides methods for identifying breast, colon, lung, ovarian or prostate tissue. These methods are particularly useful in, e.g., forensic science, breast, colon, lung, ovarian or prostate cell differentiation and development, and in tissue engineering.

[0480] In one embodiment, the invention provides a method for determining whether a sample is breast, colon, lung, ovarian or prostate tissue or has breast, colon, lung, ovarian or prostate tissue-like characteristics. The method comprises the steps of providing a sample suspected of comprising breast, colon, lung, ovarian or prostate tissue or having breast, colon, lung, ovarian or prostate tissue-like characteristics, determining whether the sample expresses one or more CaSNAs and/or CaSPs, and, if the sample expresses one or more CaSNAs and/or CaSPs, concluding that the sample comprises breast, colon, lung, ovarian or prostate tissue. In a preferred embodiment, the CaSNA encodes a polypeptide having an amino acid sequence selected from SEQ ID NO: 142-361, or a homolog, allelic variant or fragment thereof. In a more preferred embodiment, the CaSNA has a nucleotide sequence selected from SEQ ID NO: 1-141, or a hybridizing nucleic acid, an allelic variant or a part thereof. Determining whether a sample expresses a CaSNA can be accomplished by any method known in the art. Preferred methods include hybridization to microarrays, Northern blot hybridization, and quantitative or qualitative RT-PCR. In another preferred embodiment, the method can be practiced by determining whether a CaSP is expressed. Determining whether a sample expresses a CaSP can be accomplished by any method known in the art. Preferred methods include Western blot, ELISA, RIA and 2D PAGE. In one embodiment, the CaSP has an amino acid sequence selected from SEQ ID NO: 142-361, or a homolog, allelic variant or fragment thereof. In another preferred embodiment, the expression of at least two CaSNAs and/or CaSPs is determined. In a more preferred embodiment, the expression of at least three, more preferably four and even more preferably five CaSNAs and/or CaSPs are determined.

[0481] In one embodiment, the method can be used to determine whether an unknown tissue is breast, colon, lung, ovarian or prostate tissue. This is particularly useful in forensic science, in which small, damaged pieces of tissues that are not identifiable by microscopic or other means are recovered from a crime or accident scene. In another embodiment, the method can be used to determine whether a tissue is differentiating or developing into breast, colon, lung, ovarian or prostate tissue. This is important in monitoring the effects of the addition of various agents to cell or tissue culture, e.g., in producing new breast, colon, lung, ovarian or prostate tissue by tissue engineering. These agents include, e.g., growth and differentiation factors, extracellular matrix proteins and culture medium. Other factors that may be measured for effects on tissue development and differentiation include gene transfer into the cells or tissues, alterations in pH, aqueous:air interface and various other culture conditions.

Methods for Producing and Modifying Breast, Colon, Lung, Ovarian or Prostate Tissue

[0482] In another aspect, the invention provides methods for producing engineered breast, colon, lung, ovarian or prostate tissue or cells. In one embodiment, the method comprises the steps of providing cells, introducing a CaSNA or a CaSG into the cells, and growing the cells under conditions in which they exhibit one or more properties of breast, colon, lung, ovarian or prostate tissue cells. In a preferred embodiment, the cells are pleuripotent. As is well known in the art, normal breast, colon, lung, ovarian or prostate tissue comprises a large number of different cell types. Thus, in one embodiment, the engineered breast, colon, lung, ovarian or prostate tissue or cells comprises one of these cell types. In another embodiment, the engineered breast, colon, lung, ovarian or prostate tissue or cells comprises more than one breast, colon, lung, ovarian or prostate cell type. Further, the culture conditions of the cells or tissue may require manipulation in order to achieve full differentiation and development of the breast, colon, lung, ovarian or prostate cell tissue. Methods for manipulating culture conditions are well known in the art.

[0483] Nucleic acid molecules encoding one or more CaSPs are introduced into cells, preferably pleuripotent cells. In a preferred embodiment, the nucleic acid molecules encode CaSPs having amino acid sequences selected from SEQ ID NO: 142-361, or homologous proteins, analogs, allelic variants or fragments thereof. In a more preferred embodiment, the nucleic acid molecules have a nucleotide sequence selected from SEQ ID NO: 1-141, or hybridizing nucleic acids, allelic variants or parts thereof. In another highly preferred embodiment, a CaSG is introduced into the cells. Expression vectors and methods of introducing nucleic acid molecules into cells are well known in the art and are described in detail, supra.

[0484] Artificial breast, colon, lung, ovarian or prostate tissue may be used to treat patients who have lost some or all of their breast, colon, lung, ovarian or prostate function.

Pharmaceutical Compositions

[0485] In another aspect, the invention provides pharmaceutical compositions comprising the nucleic acid molecules, polypeptides, fusion proteins, antibodies, antibody derivatives, antibody fragments, agonists, antagonists, or inhibitors of the present invention. In a preferred embodiment, the pharmaceutical composition comprises a CaSNA or part thereof. In a more preferred embodiment, the CaSNA has a nucleotide sequence selected from the group consisting of SEQ ID NO: 1-141, a nucleic acid that hybridizes thereto, an allelic variant thereof, or a nucleic acid that has substantial sequence identity thereto. In another preferred embodiment, the pharmaceutical composition comprises a CaSP or fragment thereof. In a more preferred embodiment, the pharmaceutical composition comprises a CaSP having an amino acid sequence that is selected from the group consisting of SEQ ID NO: 142-361, a polypeptide that is homologous thereto, a fusion protein comprising all or a portion of the polypeptide, or an analog or derivative thereof. In another preferred embodiment, the pharmaceutical composition comprises an anti-CaSP antibody, preferably an antibody that specifically binds to a CaSP having an amino acid that is selected from the group consisting of SEQ ID NO: 142-361, or an antibody that binds to a polypeptide that is homologous thereto, a fusion protein comprising all or a portion of the polypeptide, or an analog or derivative thereof.

[0486] Due to the association of angiogenesis with cancer vascularization there is great need of new markers and methods for diagnosing angiogenesis activity to identify developing tumors and angiogenesis related diseases. Furthermore, great need is also present for new molecular targets useful in the treatment of angiogenesis and angiogenesis related diseases such as cancer. In addition known modulators of angiogenesis such as endostatin or vascular endothelial growth factor (VEGF). Use of the methods and compositions disclosed herein in combination with anti-angiogenesis drugs, drugs that block the matrix breakdown (such as BMS-275291, Dalteparin (Fragmin®), Suramin), drugs that inhibit endothelial cells (2-methoxyestradiol (2-ME), CC-5013 (Thalidomide Analog), Combretastatin A4 Phosphate, LY317615 (Protein Kinase C Beta Inhibitor), Soy Isoflavone (Genistein; Soy Protein Isolate), Thalidomide), drugs that block activators of angiogenesis (AE-941 (Neovastat™; GW786034), Anti-VEGF Antibody (Bevacizumab; Avastin™), Interferon-alpha, PTK787/ZK 222584, VEGF-Trap, ZD6474), Drugs that inhibit endothelial-specific integrin/survival signaling (EMD 121974, Anti-Anb3 Integrin Antibody (Medi-522; Vitaxin™)).

[0487] Such a composition typically contains from about 0.1 to 90% by weight of a therapeutic agent of the invention formulated in and/or with a pharmaceutically acceptable carrier or excipient.

[0488] Pharmaceutical formulation is a well-established art that is further described in Gennaro (ed.), Remington: The Science and Practice of Pharmacy, 20^{th} ed., Lippincott, Williams & Wilkins (2000); Absel et al., Pharmaceutical Dosage Forms and Drug Delivery Systems, 7^{th} ed., Lippincott Williams & Wilkins (1999); and Kibbe (ed.), Handbook of Pharmaceutical Excipients American Pharmaceutical Association, 3^{rd} ed. (2000) and thus need not be described in detail herein.

[0489] Briefly, formulation of the pharmaceutical compositions of the present invention will depend upon the route chosen for administration. The pharmaceutical compositions utilized in this invention can be administered by various routes including both enteral and parenteral routes, including oral, intravenous, intramuscular, subcutaneous, inhalation, topical, sublingual, rectal, intra-arterial, intramedullary, intrathecal, intraventricular, transmucosal, transdermal, intranasal, intraperitoneal, intrapulmonary, and intrauterine.

[0490] Oral dosage forms can be formulated as tablets, pills, dragees, capsules, liquids, gels, syrups, slurries, suspensions, and the like, for ingestion by the patient.

[0491] Solid formulations of the compositions for oral administration can contain suitable carriers or excipients, such as carbohydrate or protein fillers, such as sugars, including lactose, sucrose, mannitol, or sorbitol; starch from corn, wheat, rice, potato, or other plants; cellulose, such as methyl cellulose, hydroxypropylmethyl-cellulose, sodium carboxymethylcellulose, or microcrystalline cellulose; gums including arabic and tragacanth; proteins such as gelatin and collagen; inorganics, such as kaolin, calcium carbonate, dicalcium phosphate, sodium chloride; and other agents such as acacia and alginic acid.

[0492] Agents that facilitate disintegration and/or solubilization can be added, such as the cross-linked polyvinyl pyrrolidone, agar, alginic acid, or a salt thereof, such as sodium alginate, microcrystalline cellulose, cornstarch, sodium starch glycolate, and alginic acid.

[0493] Tablet binders that can be used include acacia, methylcellulose, sodium carboxymethylcellulose, polyvinylpyrrolidone (Povidone™), hydroxypropyl methylcellulose, sucrose, starch and ethylcellulose.

[0494] Lubricants that can be used include magnesium stearates, stearic acid, silicone fluid, talc, waxes, oils, and colloidal silica.

[0495] Fillers, agents that facilitate disintegration and/or solubilization, tablet binders and lubricants, including the aforementioned, can be used singly or in combination.

[0496] Solid oral dosage forms need not be uniform throughout. For example, dragee cores can be used in conjunction with suitable coatings, such as concentrated sugar solutions, which can also contain gum arabic, talc, polyvinylpyrrolidone, carbopol gel, polyethylene glycol, and/or titanium dioxide, lacquer solutions, and suitable organic solvents or solvent mixtures.

[0497] Oral dosage forms of the present invention include push-fit capsules made of gelatin, as well as soft, sealed capsules made of gelatin and a coating, such as glycerol or sorbitol. Push-fit capsules can contain active ingredients mixed with a filler or binders, such as lactose or starches, lubricants, such as talc or magnesium stearate, and, optionally, stabilizers. In soft capsules, the active compounds can be dissolved or suspended in suitable liquids, such as fatty oils, liquid, or liquid polyethylene glycol with or without stabilizers.

[0498] Additionally, dyestuffs or pigments can be added to the tablets or dragee coatings for product identification or to characterize the quantity of active compound, i.e., dosage.

[0499] Liquid formulations of the pharmaceutical compositions for oral (enteral) administration are prepared in water or other aqueous vehicles and can contain various suspending agents such as methylcellulose, alginates, tragacanth, pectin, kelgin, carrageenan, acacia, polyvinylpyrrolidone, and polyvinyl alcohol. The liquid formulations can also include solutions, emulsions, syrups and elixirs containing, together with the active compound(s), wetting agents, sweeteners, and coloring and flavoring agents.

[0500] The pharmaceutical compositions of the present invention can also be formulated for parenteral administration. Formulations for parenteral administration can be in the form of aqueous or non-aqueous isotonic sterile injection solutions or suspensions.

[0501] For intravenous injection, water soluble versions of the compounds of the present invention are formulated in, or if provided as a lyophilate, mixed with, a physiologically acceptable fluid vehicle, such as 5% dextrose (“D5”), physiologically buffered saline, 0.9% saline, Hanks' solution, or Ringer's solution. Intravenous formulations may include carriers, excipients or stabilizers including, without limitation, calcium, human serum albumin, citrate, acetate, calcium chloride, carbonate, and other salts.

[0502] Intramuscular preparations, e.g. a sterile formulation of a suitable soluble salt form of the compounds of the present invention, can be dissolved and administered in a pharmaceutical excipient such as Water-for-injection, 0.9% saline, or 5% glucose solution. Alternatively, a suitable insoluble form of the compound can be prepared and administered as a suspension in an aqueous base or a pharmaceutically acceptable oil base, such as an ester of a long chain acid (e.g., ethyl oleate), fatty oils such as sesame oil, triglycerides, or liposomes.

[0503] Parenteral formulations of the compositions can contain various carriers such as vegetable oils, dimethylacetamide, dimethylformamide, ethyl lactate, ethyl carbonate, isopropyl myristate, ethanol, polyols (glycerol, propylene glycol, liquid polyethylene glycol, and the like).

[0504] Aqueous injection suspensions can also contain substances that increase the viscosity of the suspension, such as sodium carboxymethyl cellulose, sorbitol, or dextran. Non-lipid polycationic amino polymers can also be used for delivery. Optionally, the suspension can also contain suitable stabilizers or agents that increase the solubility of the compounds to allow for the preparation of highly concentrated solutions.

[0505] Pharmaceutical compositions of the present invention can also be formulated to permit injectable, long-term, deposition. Injectable depot forms may be made by forming microencapsulated matrices of the compound in biodegradable polymers such as polylactide-polyglycolide. Depending upon the ratio of drug to polymer and the nature of the particular polymer employed, the rate of drug release can be controlled. Examples of other biodegradable polymers include poly(orthoesters) and poly(anhydrides). Depot injectable formulations are also prepared by entrapping the drug in microemulsions that are compatible with body tissues.

[0506] The pharmaceutical compositions of the present invention can be administered topically. For topical use the compounds of the present invention can also be prepared in suitable forms to be applied to the skin, or mucus membranes of the nose and throat, and can take the form of lotions, creams, ointments, liquid sprays or inhalants, drops, tinctures, lozenges, or throat paints. Such topical formulations further can include chemical compounds such as dimethylsulfoxide (DMSO) to facilitate surface penetration of the active ingredient. In other transdermal formulations, typically in patch-delivered formulations, the pharmaceutically active compound is formulated with one or more skin penetrants, such as 2-N-methyl-pyrrolidone (NMP) or Azone. A topical semi-solid ointment formulation typically contains a concentration of the active ingredient from about 1 to 20%, e.g., 5 to 10%, in a carrier such as a pharmaceutical cream base.

[0507] For application to the eyes or ears, the compounds of the present invention can be presented in liquid or semi-liquid form formulated in hydrophobic or hydrophilic bases as ointments, creams, lotions, paints or powders.

[0508] For rectal administration the compounds of the present invention can be administered in the form of suppositories admixed with conventional carriers such as cocoa butter, wax or other glyceride.

[0509] Inhalation formulations can also readily be formulated. For inhalation, various powder and liquid formulations can be prepared. For aerosol preparations, a sterile formulation of the compound or salt form of the compound may be used in inhalers, such as metered dose inhalers, and nebulizers. Aerosolized forms may be especially useful for treating respiratory disorders.

[0510] Alternatively, the compounds of the present invention can be in powder form for reconstitution in the appropriate pharmaceutically acceptable carrier at the time of delivery.

[0511] The pharmaceutically active compound in the pharmaceutical compositions of the present invention can be provided as the salt of a variety of acids, including but not limited to hydrochloric, sulfuric, acetic, lactic, tartaric, malic, and succinic acid. Salts tend to be more soluble in aqueous or other protonic solvents than are the corresponding free base forms.

[0512] After pharmaceutical compositions have been prepared, they are packaged in an appropriate container and labeled for treatment of an indicated condition.

[0513] The active compound will be present in an amount effective to achieve the intended purpose. The determination of an effective dose is well within the capability of those skilled in the art.

[0514] A “therapeutically effective dose” refers to that amount of active ingredient, for example CaSP polypeptide, fusion protein, or fragments thereof, antibodies specific for CaSP, agonists, antagonists or inhibitors of CaSP, which ameliorates the signs or symptoms of the disease or prevent progression thereof; as would be understood in the medical arts, cure, although desired, is not required.

[0515] The therapeutically effective dose of the pharmaceutical agents of the present invention can be estimated initially by in vitro tests, such as cell culture assays, followed by assay in model animals, usually mice, rats, rabbits, dogs, or pigs. The animal model can also be used to determine an initial preferred concentration range and route of administration.

[0516] For example, the ED50 (the dose therapeutically effective in 50% of the population) and LD50 (the dose lethal to 50% of the population) can be determined in one or more cell culture of animal model systems. The dose ratio of toxic to therapeutic effects is the therapeutic index; which can be expressed as LD50/ED50. Pharmaceutical compositions that exhibit large therapeutic indices are preferred.

[0517] The data obtained from cell culture assays and animal studies are used in formulating an initial dosage range for human use, and preferably provide a range of circulating concentrations that includes the ED50 with little or no toxicity. After administration, or between successive administrations, the circulating concentration of active agent varies within this range depending upon pharmacokinetic factors well known in the art, such as the dosage form employed, sensitivity of the patient, and the route of administration.

[0518] The exact dosage will be determined by the practitioner, in light of factors specific to the subject requiring treatment. Factors that can be taken into account by the practitioner include the severity of the disease state, general health of the subject, age, weight, gender of the subject, diet, time and frequency of administration, drug combination(s), reaction sensitivities, and tolerance/response to therapy. Long-acting pharmaceutical compositions can be administered every 3 to 4 days, every week, or once every two weeks depending on half-life and clearance rate of the particular formulation.

[0519] Normal dosage amounts may vary from 0.1 to 100,000 micrograms, up to a total dose of about 1 g, depending upon the route of administration. Where the therapeutic agent is a protein or antibody of the present invention, the therapeutic protein or antibody agent typically is administered at a daily dosage of 0.01 mg to 30 mg/kg of body weight of the patient (e.g., 1 mg/kg to 5 mg/kg). The pharmaceutical formulation can be administered in multiple doses per day, if desired, to achieve the total desired daily dose.

[0520] Guidance as to particular dosages and methods of delivery is provided in the literature and generally available to practitioners in the art. Those skilled in the art will employ different formulations for nucleotides than for proteins or their inhibitors. Similarly, delivery of polynucleotides or polypeptides will be specific to particular cells, conditions, locations, etc.

[0521] Conventional methods, known to those of ordinary skill in the art of medicine, can be used to administer the pharmaceutical formulation(s) of the present invention to the patient. The pharmaceutical compositions of the present invention can be administered alone, or in combination with other therapeutic agents or interventions.

Therapeutic Methods

[0522] The present invention further provides methods of treating subjects having defects in a gene of the invention, e.g., in expression, activity, distribution, localization, and/or solubility, which can manifest as a disorder of breast, colon, lung, ovarian or prostate function. As used herein, “treating” includes all medically-acceptable types of therapeutic intervention, including palliation and prophylaxis (prevention) of disease. The term “treating” encompasses any improvement of a disease, including minor improvements. These methods are discussed below.

[0523] Gene Therapy and Vaccines

[0524] The isolated nucleic acids of the present invention can also be used to drive in vivo expression of the polypeptides of the present invention. In vivo expression can be driven from a vector, typically a viral vector, often a vector based upon a replication incompetent retrovirus, an adenovirus, or an adeno-associated virus (AAV), for the purpose of gene therapy. In vivo expression can also be driven from signals endogenous to the nucleic acid or from a vector, often a plasmid vector, such as pVAX1 (Invitrogen, Carlsbad, Calif., USA), for purpose of “naked” nucleic acid vaccination, as further described in U.S. Pat. Nos. 5,589,466; 5,679,647; 5,804,566; 5,830,877; 5,843,913; 5,880,104; 5,958,891; 5,985,847; 6,017,897; 6,110,898; 6,204,250, the disclosures of which are incorporated herein by reference in their entireties. For cancer therapy, it is preferred that the vector also be tumor-selective. See, e.g., Doronin et al., J. Virol. 75: 3314-24 (2001).

[0525] In another embodiment of the therapeutic methods of the present invention, a therapeutically effective amount of a pharmaceutical composition comprising a nucleic acid molecule of the present invention is administered. The nucleic acid molecule can be delivered in a vector that drives expression of a CaSP, fusion protein, or fragment thereof, or without such vector. Nucleic acid compositions that can drive expression of a CaSP are administered, for example, to complement a deficiency in the native CaSP, or as DNA vaccines. Expression vectors derived from virus, replication deficient retroviruses, adenovirus, adeno-associated (AAV) virus, herpes virus, or vaccinia virus can be used as can plasmids. See, e.g., Cid-Arregui, supra. In a preferred embodiment, the nucleic acid molecule encodes a CaSP having the amino acid sequence of SEQ ID NO: 142-361, or a fragment, fusion protein, allelic variant or homolog thereof.

[0526] In still other therapeutic methods of the present invention, pharmaceutical compositions comprising host cells that express a CaSP, fusions, or fragments thereof can be administered. In such cases, the cells are typically autologous, so as to circumvent xenogeneic or allotypic rejection, and are administered to complement (Sets in CaSP production or activity. In a preferred embodiment, the nucleic acid molecules in the cells encode a CaSP having the amino acid sequence of SEQ ID NO: 142-361, or a fragment, fusion protein, allelic variant or homolog thereof.

[0527] Antisense Administration

[0528] Antisense nucleic acid compositions, or vectors that drive expression of a CaSG antisense nucleic acid, are administered to downregulate transcription and/or translation of a CaSG in circumstances in which excessive production, or production of aberrant protein, is the pathophysiologic basis of disease.

[0529] Antisense compositions useful in therapy can have a sequence that is complementary to coding or to noncoding regions of a CaSG. For example, oligonucleotides derived from the transcription initiation site, e.g., between positions −10 and +10 from the start site, are preferred.

[0530] Catalytic antisense compositions, such as ribozymes, that are capable of sequence-specific hybridization to CaSG transcripts, are also useful in therapy. See, e.g. Phylactou, Adv. Drug Deliv. Rev. 44(2-3): 97-108 (2000); Phylactou et al., Hum. Mol. Genet. 7(10): 1649-53 (1998); Rossi, Ciba Found. Symp. 209: 195-204 (1997); and Sigurdsson et al., Trends Biotechnol. 13(8): 286-9 (1995).

[0531] Other nucleic acids useful in the therapeutic methods of the present invention are those that are capable of triplex helix formation in or near the CaSG genomic locus. Such triplexing oligonucleotides are able to inhibit transcription. See, e.g., Intody et al., Nucleic Acids Res. 28(21): 4283-90 (2000); and McGuffie et al., Cancer Res. 60(14): 3790-9 (2000). Pharmaceutical compositions comprising such triplex forming oligos (TFOs) are administered in circumstances in which excessive production, or production of aberrant protein, is a pathophysiologic basis of disease.

[0532] In a preferred embodiment, the antisense molecule is derived from a nucleic acid molecule encoding a CaSP, preferably a CaSP comprising an amino acid sequence of SEQ ID NO: 142-361, or a fragment, allelic variant or homolog thereof. In a more preferred embodiment, the antisense molecule is derived from a nucleic acid molecule having a nucleotide sequence of SEQ ID NO: 1-141, or a part, allelic variant, substantially similar or hybridizing nucleic acid thereof.

[0533] Polypeptide Administration P In one embodiment of the therapeutic methods of the present invention, a therapeutically effective amount of a pharmaceutical composition comprising a CaSP, a fusion protein, fragment, analog or derivative thereof is administered to a subject with a clinically-significant CaSP defect.

[0534] Protein compositions are administered, for example, to complement a deficiency in native CaSP. In other embodiments, protein compositions are administered as a vaccine to elicit a humoral and/or cellular immune response to CaSP. The immune response can be used to modulate activity of CaSP or, depending on the immunogen, to immunize against aberrant or aberrantly expressed forms, such as mutant or inappropriately expressed isoforms. In yet other embodiments, protein fusions having a toxic moiety are administered to ablate cells that aberrantly accumulate CaSP.

[0535] In a preferred embodiment, the polypeptide administered is a CaSP comprising an amino acid sequence of SEQ ID NO: 142-361, or a fusion protein, allelic variant, homolog, analog or derivative thereof. In a more preferred embodiment, the polypeptide is encoded by a nucleic acid molecule having a nucleotide sequence of SEQ ID NO: 1-141, or a part, allelic variant, substantially similar or hybridizing nucleic acid thereof.

[0536] Antibody, Agonist and Antagonist Administration

[0537] In another embodiment of the therapeutic methods of the present invention, a therapeutically effective amount of a pharmaceutical composition comprising an antibody (including fragment or derivative thereof) of the present invention is administered. As is well known, antibody compositions are administered, for example, to antagonize activity of CaSP, or to target therapeutic agents to sites of CaSP presence and/or accumulation. In a preferred embodiment, the antibody specifically binds to a CaSP comprising an amino acid sequence of SEQ ID NO: 142-361, or a fusion protein, allelic variant, homolog, analog or derivative thereof. In a more preferred embodiment, the antibody specifically binds to a CaSP encoded by a nucleic acid molecule having a nucleotide sequence of SEQ ID NO: 1-141, or a part, allelic variant, substantially similar or hybridizing nucleic acid thereof.

[0538] The present invention also provides methods for identifying modulators which bind toga CaSP or have a modulatory effect on the expression or activity of a CaSP. Modulators which decrease the expression or activity of CaSP (antagonists) are believed to be useful in treating breast, colon, lung, ovarian or prostate cancer. Such screening assays are known to those of skill in the art and include, without limitation, cell-based assays and cell-free assays. Small molecules predicted via computer imaging to specifically bind to regions of a CaSP can also be designed, synthesized and tested for use in the imaging and treatment of breast, colon, lung, ovarian or prostate cancer. Further, libraries of molecules can be screened for potential anticancer agents by assessing the ability of the molecule to bind to the CaSPs identified herein. Molecules identified in the library as being capable of binding to a CaSP are key candidates for further evaluation for use in the treatment of breast, colon, lung, ovarian or prostate cancer. In a preferred embodiment, these molecules will downregulate expression and/or activity of a CaSP in cells.

[0539] In another embodiment of the therapeutic methods of the present invention, a pharmaceutical composition comprising a non-antibody antagonist of CaSP is administered. Antagonists of CaSP can be produced using methods generally known in the art. In particular, purified CaSP can be used to screen libraries of pharmaceutical agents, often combinatorial libraries of small molecules, to identify those that specifically bind and antagonize at least one activity of a CaSP.

[0540] In other embodiments a pharmaceutical composition comprising an agonist of a CaSP is administered. Agonists can be identified using methods analogous to those used to identify antagonists.

[0541] In a preferred embodiment, the antagonist or agonist specifically binds to and antagonizes or agonizes, respectively, a CaSP comprising an amino acid sequence of SEQ ID NO: 142-361, or a fusion protein, allelic variant, homolog, analog or derivative thereof. In a more preferred embodiment, the antagonist or agonist specifically binds to and antagonizes or agonizes, respectively, a CaSP encoded by a nucleic acid molecule having a nucleotide sequence of SEQ ID NO: 1-141, or a part, allelic variant, substantially similar or hybridizing nucleic acid thereof.

[0542] Targeting Breast, Colon, Lung, Ovarian or Prostate Tissue

[0543] The invention also provides a method in which a polypeptide of the invention, or an antibody thereto, is linked to a therapeutic agent such that it can be delivered to the breast, colon, lung, ovarian or prostate or to specific cells in the breast, colon, lung ovarian or prostate. In a preferred embodiment, an anti-CaSP antibody is linked to a therapeutic agent and is administered to a patient in need of such therapeutic agent. The therapeutic agent may be a toxin, if breast, colon, lung, ovarian or prostate tissue needs to be selectively destroyed. This would be useful for targeting and killing breast, colon, lung, ovarian or prostate cancer cells. In another embodiment, the therapeutic agent may be a growth or differentiation factor, which would be useful for promoting breast, colon, lung, ovarian or prostate cell function.

[0544] In another embodiment, an anti-CaSP antibody may be linked to an imaging agent that can be detected using, e.g., magnetic resonance imaging, CT or PET. This would be useful for determining and monitoring breast, colon, lung, ovarian or prostate function, identifying breast, colon, lung, ovarian or prostate cancer tumors, and identifying noncancerous breast, colon, lung, ovarian or prostate diseases.

### EXAMPLES

### Example 1a

### Alternative Splice Variants

[0545] We identified gene transcripts using the Gencarta™ tools from Compugen Ltd. (Tel Aviv, Israel). Gencarta™ was used to identify splice variant transcripts based on sequences from a variety of public and proprietary databases. These splice variants are either sequences which differ from a previously defined sequence or comprise new uses of known sequences. In general related variants are annotated as DEX0477_XXX.nt.1, DEX0477_XXX.nt.2, DEX0477_XXX.nt.3, etc. The variant DNA sequences encode proteins which differ from a previously defined protein sequence. In relation to the nucleotide sequence naming convention, protein variants are annotated as DEX0477_XXX.aa.1, DEX0477_XXX.aa.2, etc., wherein transcript DEX0477_XXX.nt.1 encodes protein DEX0477_XXX.aa.1. A single transcript may encode a protein from an alternate Open Reading Frame (ORF) which is designated DEX0477_XXX.orf.1. Additionally, multiple transcripts may encode for a single protein. In this case, DEX0477_XXX.nt.1 and DEX0477_XXX.nt.2 will both be associated with DEX0477_XXX.aa.1. The table below is organized to demonstrate associations between transcripts and proteins, specifically that nucleotide transcripts on the left (DEX0477_XXX.nt.1) encode for amino acid sequences on the right (DEX0477_XXX.aa.1).

[0546] The mapping of the nucleic acid (“NT”) SEQ ID NO; DEX ID; chromosomal location (if known); open reading frame (ORF) location; amino acid (“AA”) SEQ ID NO; AA DEX ID; are shown in the table below.

| SEQ | | | | SEQ | |
|---|---|---|---|---|---|
| ID NO | DEX ID | Chromo Map | ORF Loc | ID NO | DEX ID |
| 1 | DEX0477_001.nt.1 | 4p16.3 | 276-1268 | 142 | DEX0477_001.aa.1 |
| 2 | DEX0477_001.nt.2 | 4p16.3 | 1297-2850 | 143 | DEX0477_001.aa.2 |
| 2 | DEX0477_001.nt.2 | 4p16.3 | 1-894 | 144 | DEX0477_001.aa.3 |
| 3 | DEX0477_001.nt.4 | 4p16.3 | 1-1512 | 145 | DEX0477_001.aa.4 |
| 3 | DEX0477_001.nt.4 | 4p16.3 | 1-894 | 144 | DEX0477_001.aa.3 |
| 4 | DEX0477_001.nt.5 | 4p16.3 | 1-1512 | 145 | DEX0477_001.aa.4 |
| 4 | DEX0477_001.nt.5 | 4p16.3 | 1-894 | 144 | DEX0477_001.aa.3 |
| 5 | DEX0477_001.nt.6 | 4p16.3 | 1297-2808 | 145 | DEX0477_001.aa.4 |
| 5 | DEX0477_001.nt.6 | 4p16.3 | 1-894 | 144 | DEX0477_001.aa.3 |
| 6 | DEX0477_001.nt.7 | 4p16.3 | 1-2487 | 146 | DEX0477_001.aa.7 |
| 6 | DEX0477_001.nt.7 | 4p16.3 | 1-894 | 144 | DEX0477_001.aa.3 |
| 6 | DEX0477_001.nt.7 | 4p16.3 | 1297-2808 | 147 | DEX0477_001.orf.7 |
| 7 | DEX0477_001.nt.8 | 4p16.3 | 1-2805 | 148 | DEX0477_001.aa.8 |
| 7 | DEX0477_001.nt.8 | 4p16.3 | 1-894 | 144 | DEX0477_001.aa.3 |
| 7 | DEX0477_001.nt.8 | 4p16.3 | 1297-2808 | 149 | DEX0477_001.orf.8 |
| 8 | DEX0477_002.nt.1 | 4p16.3 | 319-2809 | 146 | DEX0477_001.aa.7 |
| 8 | DEX0477_002.nt.1 | 4p16.3 | 1297-2808 | 150 | DEX0477_002.orf.1 |
| 9 | DEX0477_002.nt.2 | 4p16.3 | 2-871 | 151 | DEX0477_002.aa.2 |
| 10 | DEX0477_001.nt.9 | 4p16.3 | 1-2487 | 146 | DEX0477_001.aa.7 |
| 10 | DEX0477_001.nt.9 | 4p16.3 | 1-894 | 144 | DEX0477_001.aa.3 |
| 10 | DEX0477_001.nt.9 | 4p16.3 | 1297-2808 | 152 | DEX0477_001.orf.9 |
| 11 | DEX0477_003.nt.1 | 11q12.3 | 121-996 | 153 | DEX0477_003.aa.1 |
| 12 | DEX0477_003.nt.2 | 11q12.3 | 823-1140 | 154 | DEX0477_003.aa.2 |
| 13 | DEX0477_004.nt.1 | 14q32.33 | 3-560 | 155 | DEX0477_004.aa.1 |
| 14 | DEX0477_005.nt.1 | 2p25.1 | 326-686 | 156 | DEX0477_005.aa.1 |
| 14 | DEX0477_005.nt.1 | 2p25.1 | 87-683 | 157 | DEX0477_005.orf.1 |
| 15 | DEX0477_006.nt.1 | 8q22.3 | 1-706 | 158 | DEX0477_006.aa.1 |
| 15 | DEX0477_006.nt.1 | 8q22.3 | 102-704 | 159 | DEX0477_006.orf.1 |
| 16 | DEX0477_007.nt.1 | 9q34.11 | 6-486 | 160 | DEX0477_007.aa.1 |
| 16 | DEX0477_007.nt.1 | 9q34.11 | 8-481 | 161 | DEX0477_007.orf.1 |
| 17 | DEX0477_008.nt.1 | 8q22.3 | 146-832 | 162 | DEX0477_008.aa.1 |
| 18 | DEX0477_009.nt.1 | 16q22.1 | 363-1005 | 163 | DEX0477_009.aa.1 |
| 18 | DEX0477_009.nt.1 | 16q22.1 | 25-540 | 164 | DEX0477_009.orf.1 |
| 19 | DEX0477_010.nt.1 | 2p25.1 | 103-1425 | 165 | DEX0477_010.aa.1 |
| 19 | DEX0477_010.nt.1 | 2p25.1 | 41-1423 | 166 | DEX0477_010.orf.1 |
| 20 | DEX0477_011.nt.1 | 8q24.3 | 2-292 | 167 | DEX0477_011.aa.1 |
| 21 | DEX0477_012.nt.1 | 3229131-3229414; | 1-246 | 168 | DEX0477_012.aa.1 |
| | | 1p36.33 | | | |
| 21 | DEX0477_012.nt.1 | 3229131-3229414; | 3-308 | 169 | DEX0477_012.orf.1 |
| | | 1p36.33 | | | |
| 22 | DEX0477_013.nt.1 | 7q11.23 | 2087-4217 | 170 | DEX0477_013.aa.1 |
| 22 | DEX0477_013.nt.1 | 7q11.23 | 2016-3254 | 171 | DEX0477_013.orf.1 |
| 23 | DEX0477_014.nt.1 | 19q13.2 | 1-388 | 172 | DEX0477_014.aa.1 |
| 23 | DEX0477_014.nt.1 | 19q13.2 | 91-372 | 173 | DEX0477_014.orf.1 |
| 24 | DEX0477_014.nt.2 | 19q13.2 | 1-358 | 174 | DEX0477_014.aa.2 |
| 24 | DEX0477_014.nt.2 | 19q13.2 | 43-342 | 175 | DEX0477_014.orf.2 |
| 25 | DEX0477_014.nt.3 | 19q13.2 | 1-93 | 176 | DEX0477_014.aa.3 |
| 25 | DEX0477_014.nt.3 | 19q13.2 | 26-277 | 177 | DEX0477_014.orf.3 |
| 26 | DEX0477_015.nt.1 | 21q22.3 | 110-544 | 178 | DEX0477_015.aa.1 |
| 27 | DEX0477_015.nt.2 | 21q22.3 | 110-382 | 179 | DEX0477_015.aa.2 |
| 28 | DEX0477_016.nt.1 | 17q12 | 292-3942 | 180 | DEX0477_016.aa.1 |
| 29 | DEX0477_016.nt.2 | 17q12 | 151-4278 | 181 | DEX0477_016.aa.2 |
| 29 | DEX0477_016.nt.2 | 17q12 | 1-1725 | 182 | DEX0477_016.aa.3 |
| 29 | DEX0477_016.nt.2 | 17q12 | 1832-4276 | 183 | DEX0477_016.orf.2 |
| 30 | DEX0477_016.nt.4 | 17q12 | 1-495 | 184 | DEX0477_016.aa.4 |
| 30 | DEX0477_016.nt.4 | 17q12 | 6-491 | 185 | DEX0477_016.orf.4 |
| 31 | DEX0477_016.nt.5 | 17q12 | 1-228 | 186 | DEX0477_016.aa.5 |
| 31 | DEX0477_016.nt.5 | 17q12 | 200-499 | 187 | DEX0477_016.orf.5 |
| 32 | DEX0477_017.nt.1 | 17q12 | 151-2184 | 188 | DEX0477_017.aa.1 |
| 33 | DEX0477_018.nt.1 | 14q24.3 | 73-662 | 189 | DEX0477_018.aa.1 |
| 33 | DEX0477_018.nt.1 | 14q24.3 | 315-656 | 190 | DEX0477_018.orf.1 |
| 34 | DEX0477_019.nt.1 | 19q13.2 | 2-197 | 191 | DEX0477_019.aa.1 |
| 34 | DEX0477_019.nt.1 | 19q13.2 | 35-1009 | 192 | DEX0477_019.orf.1 |
| 35 | DEX0477_020.nt.1 | 19q13.2 | 123-2228 | 193 | DEX0477_020.aa.1 |
| 36 | DEX0477_020.nt.2 | 19q13.2 | 123-2300 | 194 | DEX0477_020.aa.2 |
| 37 | DEX0477_021.nt.1 | 7p21.1 | 22-603 | 195 | DEX0477_021.aa.1 |
| 37 | DEX0477_021.nt.1 | 7p21.1 | 3-599 | 196 | DEX0477_021.orf.1 |
| 38 | DEX0477_021.nt.2 | 7p21.1 | 22-587 | 197 | DEX0477_021.aa.2 |
| 38 | DEX0477_021.nt.2 | 7p21.1 | 25-582 | 198 | DEX0477_021.orf.2 |
| 39 | DEX0477_022.nt.1 | 19q13.2 | 1-412 | 199 | DEX0477_022.aa.1 |
| 39 | DEX0477_022.nt.1 | 19q13.2 | 311-586 | 200 | DEX0477_022.orf.1 |
| 40 | DEX0477_023.nt.1 | 7p21.1 | 46-295 | 201 | DEX0477_023.aa.1 |
| 40 | DEX0477_023.nt.1 | 7p21.1 | 164-400 | 202 | DEX0477_023.orf.1 |
| 41 | DEX0477_024.nt.1 | 7p21.1 | 70-220 | 203 | DEX0477_024.aa.1 |
| 41 | DEX0477_024.nt.1 | 7p21.1 | 54-473 | 204 | DEX0477_024.orf.1 |
| 42 | DEX0477_024.nt.2 | 7p21.1 | 16-242 | 205 | DEX0477_024.aa.2 |
| 42 | DEX0477_024.nt.2 | 7p21.1 | 75-494 | 206 | DEX0477_024.orf.2 |
| 43 | DEX0477_024.nt.3 | 7p21.1 | 7-232 | 207 | DEX0477_024.aa.3 |
| 43 | DEX0477_024.nt.3 | 7p21.1 | 67-486 | 208 | DEX0477_024.orf.3 |
| 44 | DEX0477_024.nt.4 | 7p21.1 | 7-376 | 209 | DEX0477_024.aa.4 |
| 44 | DEX0477_024.nt.4 | 7p21.1 | 2-253 | 210 | DEX0477_024.orf.4 |
| 45 | DEX0477_025.nt.1 | 4q22.1 | 13-371 | 211 | DEX0477_025.aa.1 |
| 45 | DEX0477_025.nt.1 | 4q22.1 | 16-366 | 212 | DEX0477_025.orf.1 |
| 46 | DEX0477_026.nt.1 | 17q23.2 | 88-317 | 213 | DEX0477_026.aa.1 |
| 46 | DEX0477_026.nt.1 | 17q23.2 | 2-430 | 214 | DEX0477_026.orf.1 |
| 47 | DEX0477_027.nt.1 | 1q23.3 | 1-339 | 215 | DEX0477_027.aa.1 |
| 48 | DEX0477_027.nt.2 | 1q23.3 | 31-664 | 216 | DEX0477_027.aa.2 |
| 48 | DEX0477_027.nt.2 | 1q23.3 | 144-662 | 217 | DEX0477_027.orf.2 |
| 49 | DEX0477_027.nt.3 | 1q23.3 | 31-601 | 218 | DEX0477_027.aa.3 |
| 49 | DEX0477_027.nt.3 | 1q23.3 | 144-599 | 219 | DEX0477_027.orf.3 |
| 50 | DEX0477_027.nt.4 | 1q23.3 | 2-320 | 220 | DEX0477_027.aa.4 |
| 50 | DEX0477_027.nt.4 | 1q23.3 | 1-336 | 221 | DEX0477_027.orf.4 |
| 51 | DEX0477_027.nt.5 | 1q23.3 | 454-846 | 222 | DEX0477_027.aa.5 |
| 52 | DEX0477_027.nt.6 | 1q23.3 | 998-1325 | 223 | DEX0477_027.aa.6 |
| 52 | DEX0477_027.nt.6 | 1q23.3 | 2-397 | 224 | DEX0477_027.orf.6 |
| 53 | DEX0477_027.nt.7 | 1q23.3 | 31-520 | 225 | DEX0477_027.aa.7 |
| 53 | DEX0477_027.nt.7 | 1q23.3 | 144-518 | 226 | DEX0477_027.orf.7 |
| 54 | DEX0477_028.nt.1 | 3q21.1 | 1-5445 | 227 | DEX0477_028.aa.1 |
| 55 | DEX0477_028.nt.2 | 3q21.1 | 1-5232 | 228 | DEX0477_028.aa.2 |
| 55 | DEX0477_028.nt.2 | 3q21.1 | 5-2908 | 229 | DEX0477_028.orf.2 |
| 56 | DEX0477_028.nt.3 | 3q21.1 | 1-5232 | 228 | DEX0477_028.aa.2 |
| 56 | DEX0477_028.nt.3 | 3q21.1 | 5-2908 | 230 | DEX0477_028.orf.3 |
| 57 | DEX0477_028.nt.4 | 3q21.1 | 1-5232 | 228 | DEX0477_028.aa.2 |
| 57 | DEX0477_028.nt.4 | 3q21.1 | 5-2908 | 231 | DEX0477_028.orf.4 |
| 58 | DEX0477_029.nt.1 | 3q21.1 | 2-5237 | 232 | DEX0477_029.aa.1 |
| 58 | DEX0477_029.nt.1 | 3q21.1 | 5-2908 | 233 | DEX0477_029.orf.1 |
| 59 | DEX0477_030.nt.1 | 19q13.41 | 97-942 | 234 | DEX0477_030.aa.1 |
| 60 | DEX0477_030.nt.2 | 19q13.41 | 1-663 | 235 | DEX0477_030.aa.2 |
| 61 | DEX0477_030.nt.3 | 19q13.41 | 1-106 | 236 | DEX0477_030.aa.3 |
| 61 | DEX0477_030.nt.3 | 19q13.41 | 1-174 | 237 | DEX0477_030.orf.3 |
| 62 | DEX0477_031.nt.1 | 17q25.3 | 1-425 | 238 | DEX0477_031.aa.1 |
| 62 | DEX0477_031.nt.1 | 17q25.3 | 97-549 | 239 | DEX0477_031.orf.1 |
| 63 | DEX0477_032.nt.1 | 21q22.3 | 278-1483 | 240 | DEX0477_032.aa.1 |
| 64 | DEX0477_033.nt.1 | 14q23.3 | 1-468 | 241 | DEX0477_033.aa.1 |
| 64 | DEX0477_033.nt.1 | 14q23.3 | 66-464 | 242 | DEX0477_033.orf.1 |
| 65 | DEX0477_033.nt.2 | 14q23.3 | 206-583 | 243 | DEX0477_033.aa.2 |
| 66 | DEX0477_033.nt.3 | 14q23.3 | 134-587 | 244 | DEX0477_033.aa.3 |
| 67 | DEX0477_034.nt.1 | 10p13 | 467-1024 | 245 | DEX0477_034.aa.1 |
| 68 | DEX0477_035.nt.1 | 11q13.2 | 69-641 | 246 | DEX0477_035.aa.1 |
| 69 | DEX0477_035.nt.2 | 11q13.2 | 100-539 | 247 | DEX0477_035.aa.2 |
| 69 | DEX0477_035.nt.2 | 11q13.2 | 2-538 | 248 | DEX0477_035.orf.2 |
| 70 | DEX0477_035.nt.3 | 11q13.2 | 241-818 | 249 | DEX0477_035.aa.3 |
| 70 | DEX0477_035.nt.3 | 11q13.2 | 107-814 | 250 | DEX0477_035.orf.3 |
| 71 | DEX0477_035.nt.4 | 11q13.2 | 34-911 | 251 | DEX0477_035.aa.4 |
| 71 | DEX0477_035.nt.4 | 11q13.2 | 3-908 | 252 | DEX0477_035.orf.4 |
| 72 | DEX0477_035.nt.5 | 11q13.2 | 34-716 | 253 | DEX0477_035.aa.5 |
| 72 | DEX0477_035.nt.5 | 11q13.2 | 3-713 | 254 | DEX0477_035.orf.5 |
| 73 | DEX0477_036.nt.1 | 1p34.2 | 1-389 | 255 | DEX0477_036.aa.1 |
| 73 | DEX0477_036.nt.1 | 1p34.2 | 3-404 | 256 | DEX0477_036.orf.1 |
| 74 | DEX0477_037.nt.1 | 6p12.2 | 1-386 | 257 | DEX0477_037.aa.1 |
| 74 | DEX0477_037.nt.1 | 6p12.2 | 59-418 | 258 | DEX0477_037.orf.1 |
| 75 | DEX0477_038.nt.1 | 4q22.1 | 150-912 | 259 | DEX0477_038.aa.1 |
| 75 | DEX0477_038.nt.1 | 4q22.1 | 13-648 | 260 | DEX0477_038.orf.1 |
| 76 | DEX0477_038.nt.2 | 4q22.1 | 150-870 | 261 | DEX0477_038.aa.2 |
| 76 | DEX0477_038.nt.2 | 4q22.1 | 13-606 | 262 | DEX0477_038.orf.2 |
| 77 | DEX0477_038.nt.3 | 4q22.1 | 349-859 | 263 | DEX0477_038.aa.3 |
| 77 | DEX0477_038.nt.3 | 4q22.1 | 185-595 | 264 | DEX0477_038.orf.3 |
| 78 | DEX0477_039.nt.1 | 17q25.3 | 34-505 | 265 | DEX0477_039.aa.1 |
| 78 | DEX0477_039.nt.1 | 17q25.3 | 88-672 | 266 | DEX0477_039.orf.1 |
| 79 | DEX0477_040.nt.1 | 1p36.23 | 152-1279 | 267 | DEX0477_040.aa.1 |
| 80 | DEX0477_040.nt.2 | 1p36.23 | 152-1363 | 268 | DEX0477_040.aa.2 |
| 81 | DEX0477_041.nt.1 | 11q13.1 | 477-815 | 269 | DEX0477_041.aa.1 |
| 82 | DEX0477_042.nt.1 | 16q13 | 1-95 | 270 | DEX0477_042.aa.1 |
| 82 | DEX0477_042.nt.1 | 16q13 | 52-249 | 271 | DEX0477_042.orf.1 |
| 83 | DEX0477_043.nt.1 | 17q21.2 | 70-814 | 272 | DEX0477_043.aa.1 |
| 83 | DEX0477_043.nt.1 | 17q21.2 | 1-741 | 273 | DEX0477_043.orf.1 |
| 84 | DEX0477_044.nt.1 | 1p34.1 | 382-849 | 274 | DEX0477_044.aa.1 |
| 85 | DEX0477_044.nt.2 | 1p34.1 | 459-1347 | 275 | DEX0477_044.aa.2 |
| 85 | DEX0477_044.nt.2 | 1p34.1 | 352-972 | 276 | DEX0477_044.orf.2 |
| 86 | DEX0477_044.nt.3 | 1p34.1 | 1-334 | 277 | DEX0477_044.aa.3 |
| 86 | DEX0477_044.nt.3 | 1p34.1 | 2-331 | 278 | DEX0477_044.orf.3 |
| 87 | DEX0477_045.nt.1 | 1p34.1 | 382-849 | 279 | DEX0477_045.aa.1 |
| 88 | DEX0477_046.nt.1 | 4q12 | 1-513 | 280 | DEX0477_046.aa.1 |
| 89 | DEX0477_047.nt.1 | 1q32.2 | 1292-1596 | 281 | DEX0477_047.aa.1 |
| 89 | DEX0477_047.nt.1 | 1q32.2 | 71-430 | 282 | DEX0477_047.orf.1 |
| 90 | DEX0477_048.nt.1 | 21q22.3 | 1-1158 | 283 | DEX0477_048.aa.1 |
| 91 | DEX0477_048.nt.2 | 21q22.3 | 1-1161 | 283 | DEX0477_048.aa.1 |
| 92 | DEX0477_048.nt.3 | 21q22.3 | 1-888 | 284 | DEX0477_048.aa.3 |
| 93 | DEX0477_048.nt.4 | 21q22.3 | 1-1014 | 285 | DEX0477_048.aa.4 |
| 94 | DEX0477_049.nt.1 | 21q22.3 | 454-972 | 286 | DEX0477_049.aa.1 |
| 95 | DEX0477_049.nt.2 | 11p15.5 | 37-435 | 287 | DEX0477_049.aa.2 |
| 96 | DEX0477_050.nt.1 | 17q21.2 | 13-1008 | 288 | DEX0477_050.aa.1 |
| 96 | DEX0477_050.nt.1 | 17q21.2 | 23-808 | 289 | DEX0477_050.orf.1 |
| 97 | DEX0477_051.nt.1 | 1p36.11 | 499-1072 | 290 | DEX0477_051.aa.1 |
| 97 | DEX0477_051.nt.1 | 1p36.11 | 548-1069 | 291 | DEX0477_051.orf.1 |
| 98 | DEX0477_052.nt.1 | 11q23.3 | 1-728 | 292 | DEX0477_052.aa.1 |
| 98 | DEX0477_052.nt.1 | 11q23.3 | 61-726 | 293 | DEX0477_052.orf.1 |
| 99 | DEX0477_053.nt.1 | 17q21.2 | 271-924 | 294 | DEX0477_053.aa.1 |
| 99 | DEX0477_053.nt.1 | 17q21.2 | 14-922 | 295 | DEX0477_053.orf.1 |
| 100 | DEX0477_054.nt.1 | 19q13.32 | 1-314 | 296 | DEX0477_054.aa.1 |
| 100 | DEX0477_054.nt.1 | 19q13.32 | 192-464 | 297 | DEX0477_054.orf.1 |
| 101 | DEX0477_054.nt.2 | 12p13.31 | 249-1020 | 298 | DEX0477_054.aa.2 |
| 101 | DEX0477_054.nt.2 | 12p13.31 | 3-1055 | 299 | DEX0477_054.orf.2 |
| 102 | DEX0477_055.nt.1 | 17q21.2 | 80-1379 | 300 | DEX0477_055.aa.1 |
| 102 | DEX0477_055.nt.1 | 17q21.2 | 487-1566 | 301 | DEX0477_055.orf.1 |
| 103 | DEX0477_055.nt.2 | 17q21.2 | 80-1262 | 302 | DEX0477_055.aa.2 |
| 103 | DEX0477_055.nt.2 | 17q21.2 | 54-1550 | 303 | DEX0477_055.orf.2 |
| 104 | DEX0477_055.nt.3 | 17q21.2 | 80-1262 | 302 | DEX0477_055.aa.2 |
| 104 | DEX0477_055.nt.3 | 17q21.2 | 54-1427 | 304 | DEX0477_055.orf.3 |
| 105 | DEX0477_055.nt.4 | 17q21.2 | 81-923 | 305 | DEX0477_055.aa.4 |
| 106 | DEX0477_056.nt.1 | 12q13.13 | 1-152 | 306 | DEX0477_056.aa.1 |
| 106 | DEX0477_056.nt.1 | 12q13.13 | 153-446 | 307 | DEX0477_056.orf.1 |
| 107 | DEX0477_057.nt.1 | 8q24.22 | 291-968 | 308 | DEX0477_057.aa.1 |
| 108 | DEX0477_058.nt.1 | 1q32.1 | 111-734 | 309 | DEX0477_058.aa.1 |
| 109 | DEX0477_058.nt.2 | 1q32.1 | 438-947 | 310 | DEX0477_058.aa.2 |
| 110 | DEX0477_059.nt.1 | 17q21.2 | 3-203 | 311 | DEX0477_059.aa.1 |
| 111 | DEX0477_059.nt.2 | 17q21.2 | 1-101 | 312 | DEX0477_059.aa.2 |
| 111 | DEX0477_059.nt.2 | 17q21.2 | 2-223 | 313 | DEX0477_059.orf.2 |
| 112 | DEX0477_060.nt.1 | 16q21 | 34-235 | 314 | DEX0477_060.aa.1 |
| 112 | DEX0477_060.nt.1 | 16q21 | 3662-3943 | 315 | DEX0477_060.orf.1 |
| 113 | DEX0477_060.nt.2 | 16q21 | 1-94 | 316 | DEX0477_060.aa.2 |
| 113 | DEX0477_060.nt.2 | 16q21 | 3569-3850 | 317 | DEX0477_060.orf.2 |
| 114 | DEX0477_061.nt.1 | 13q33.3 | 268-708 | 318 | DEX0477_061.aa.1 |
| 115 | DEX0477_061.nt.2 | 13q33.3 | 267-711 | 318 | DEX0477_061.aa.1 |
| 116 | DEX0477_062.nt.1 | 11q24.1 | 19-1075 | 319 | DEX0477_062.aa.1 |
| 116 | DEX0477_062.nt.1 | 11q24.1 | 414-1028 | 320 | DEX0477_062.orf.1 |
| 117 | DEX0477_063.nt.1 | 11p15.5 | 22-378 | 321 | DEX0477_063.aa.1 |
| 117 | DEX0477_063.nt.1 | 11p15.5 | 1-549 | 322 | DEX0477_063.orf.1 |
| 118 | DEX0477_063.nt.2 | 11p15.5 | 565-829 | 323 | DEX0477_063.aa.2 |
| 118 | DEX0477_063.nt.2 | 11p15.5 | 534-1001 | 324 | DEX0477_063.orf.2 |
| 119 | DEX0477_064.nt.1 | 6p21.33 | 22-252 | 325 | DEX0477_064.aa.1 |
| 119 | DEX0477_064.nt.1 | 6p21.33 | 264-578 | 326 | DEX0477_064.orf.1 |
| 120 | DEX0477_065.nt.1 | 4q25 | 91-421 | 327 | DEX0477_065.aa.1 |
| 120 | DEX0477_065.nt.1 | 4q25 | 2-460 | 328 | DEX0477_065.orf.1 |
| 121 | DEX0477_065.nt.2 | 4q25 | 1-188 | 329 | DEX0477_065.aa.2 |
| 121 | DEX0477_065.nt.2 | 4q25 | 178-483 | 330 | DEX0477_065.orf.2 |
| 122 | DEX0477_065.nt.3 | 4q25 | 78-326 | 331 | DEX0477_065.aa.3 |
| 123 | DEX0477_066.nt.1 | 4q25 | 92-460 | 332 | DEX0477_066.aa.1 |
| 124 | DEX0477_066.nt.2 | 4q25 | 78-326 | 333 | DEX0477_066.aa.2 |
| 125 | DEX0477_067.nt.1 | 4p16.1 | 1-285 | 334 | DEX0477_067.aa.1 |
| 125 | DEX0477_067.nt.1 | 4p16.1 | 80-631 | 335 | DEX0477_067.orf.1 |
| 126 | DEX0477_068.nt.1 | X: 1366569-1366868; | 1-195 | 336 | DEX0477_068.aa.1 |
| | | Xp22.33 | | | |
| 126 | DEX0477_068.nt.1 | X: 1366569-1366868; | 329-481 | 337 | DEX0477_068.orf.1 |
| | | Xp22.33 | | | |
| 127 | DEX0477_069.nt.1 | 20p12.3 | 1-420 | 338 | DEX0477_069.aa.1 |
| 128 | DEX0477_070.nt.1 | 8q22.3 | 130-557 | 339 | DEX0477_070.aa.1 |
| 128 | DEX0477_070.nt.1 | 8q22.3 | 3-368 | 340 | DEX0477_070.orf.1 |
| 129 | DEX0477_071.nt.1 | 7q21.3 | 1-158 | 341 | DEX0477_071.aa.1 |
| 129 | DEX0477_071.nt.1 | 7q21.3 | 3-272 | 342 | DEX0477_071.orf.1 |
| 130 | DEX0477_071.nt.2 | 7q21.3 | 1-136 | 343 | DEX0477_071.aa.2 |
| 130 | DEX0477_071.nt.2 | 7q21.3 | 482-745 | 344 | DEX0477_071.orf.2 |
| 131 | DEX0477_072.nt.1 | 1p22.2 | 547-2590 | 345 | DEX0477_072.aa.1 |
| 131 | DEX0477_072.nt.1 | 1p22.2 | 434-2065 | 346 | DEX0477_072.orf.1 |
| 132 | DEX0477_072.nt.2 | 1p22.2 | 2-1466 | 347 | DEX0477_072.aa.2 |
| 132 | DEX0477_072.nt.2 | 1p22.2 | 49-1464 | 348 | DEX0477_072.orf.2 |
| 133 | DEX0477_073.nt.1 | 19q13.31 | 652-1854 | 349 | DEX0477_073.aa.1 |
| 134 | DEX0477_073.nt.2 | 19q13.31 | 512-917 | 350 | DEX0477_073.aa.2 |
| 134 | DEX0477_073.nt.2 | 19q13.31 | 432-914 | 351 | DEX0477_073.orf.2 |
| 135 | DEX0477_074.nt.1 | 19q13.31 | 652-1932 | 352 | DEX0477_074.aa.1 |
| 136 | DEX0477_075.nt.1 | 6p22.1 | 40-241 | 353 | DEX0477_075.aa.1 |
| 136 | DEX0477_075.nt.1 | 6p22.1 | 127-348 | 354 | DEX0477_075.orf.1 |
| 137 | DEX0477_076.nt.1 | 20p12.2 | 269-1873 | 355 | DEX0477_076.aa.1 |
| 138 | DEX0477_077.nt.1 | 11q22.2 | 124-750 | 356 | DEX0477_077.aa.1 |
| 139 | DEX0477_078.nt.1 | 2q32.2 | 187-2110 | 357 | DEX0477_078.aa.1 |
| 139 | DEX0477_078.nt.1 | 2q32.2 | 1-1701 | 358 | DEX0477_078.orf.1 |
| 140 | DEX0477_079.nt.1 | 1p36.23 | 1-471 | 359 | DEX0477_079.aa.1 |
| 141 | DEX0477_080.nt.1 | 1p36.23 | 392-719 | 360 | DEX0477_080.aa.1 |
| 141 | DEX0477_080.nt.1 | 1p36.23 | 2-376 | 361 | DEX0477_080.orf.1 |

[0547] The polypeptides of the present invention were analyzed and the following attributes were identified; specifically, epitopes, post translational modifications, signal peptides and transmembrane domains. Antigenicity (Epitope) prediction was performed through the antigenic module in the EMBOSS package. Rice, P., EMBOSS: The European Molecular Biology Open Software Suite, Trends in Genetics 16(6): 276-277 (2000). The antigenic module predicts potentially antigenic regions of a protein sequence, using the method of Kolaskar and Tongaonkar. Kolaskar, A S and Tongaonkar, P C., A semi-empirical method for prediction of antigenic determinants on protein antigens, FEBS Letters 276: 172-174 (1990). Examples of post-translational modifications (PTMs) and other motifs of the CaSPs of this invention are listed below. In addition, antibodies that specifically bind such post-translational modifications may be useful as a diagnostic or as therapeutic. The PTMs and other motifs were predicted by using the ProSite Dictionary of Proteins Sites and Patterns (Bairoch et al., Nucleic Acids Res. 25(1):217-221 (1997)), the following motifs, including PTMs, were predicted for the CaSPs of the invention. The signal peptides were detected by using the SignalP 2.0, see Nielsen et al., Protein Engineering 12, 3-9 (1999). Prediction of transmembrane helices in proteins was performed by the application TMHMM 2.0, “currently the best performing transmembrane prediction program”, according to authors (Krogh et al., Journal of Molecular Biology, 305(3):567-580, (2001); Moller et al., Bioinformatics 17(7):646-653, (2001); Sonnhammer, et al., A hidden Markov model for predicting transmembrane helices in protein sequences in Glasgow, et al. Ed. Proceedings of the Sixth International Conference on Intelligent Systems for Molecular Biology, pages 175-182, Menlo Park, Calif., 1998. AAAI Press. The PSORT II program may also be used to predict cellular localizations. Horton et al., Intelligent Systems for Molecular Biology 5: 147-152 (1997). The table below includes the following sequence annotations: Signal peptide presence; TM (number of membrane domain, topology in orientation and position); Amino acid location and antigenic index (location, AI score); PTM and other motifs (type, amino acid residue locations); and functional domains (type, amino acid residue locations).

| | Sig | | | | |
|---|---|---|---|---|---|
| DEX ID | P | TMHMM | Antigenicity | PTM | Domains |
| DEX0477_001.aa.1 | Y | 0 - o1-331; | 322-328, | PKC_PHOSPHO_SITE | TSP1 277-331; TSP1 |
| | | | 1.185; | 48-50; MYRISTYL | 280-331; tsp_1 281-330; |
| | | | 181-188, | 287-292; | |
| | | | 1.117; | CK2_PHOSPHO_SITE | |
| | | | 249-260, | 274-277; MYRISTYL | |
| | | | 1.149; | 132-137; | |
| | | | 302-308, | PKC_PHOSPHO_SITE | |
| | | | 1.135; | 36-38; | |
| | | | 266-283, | CAMP_PHOSPHO_SITE | |
| | | | 1.146; | 144-147; | |
| | | | 215-245, | CK2_PHOSPHO_SITE | |
| | | | 1.145; | 270-273; MYRISTYL | |
| | | | 285-296, | 26-31; | |
| | | | 1.114; | PKC_PHOSPHO_SITE | |
| | | | 54-66, 1.082; | 247-249; MYRISTYL | |
| | | | 114-132, | 74-79; | |
| | | | 1.173; | CK2_PHOSPHO_SITE | |
| | | | 68-76, 1.088; | 209-212; MYRISTYL | |
| | | | 31-46, 1.092; | 290-295; | |
| | | | 6-28, 1.22; | CK2_PHOSPHO_SITE | |
| | | | 139-173, | 136-139; MYRISTYL | |
| | | | 1.216; | 134-139; MYRISTYL | |
| | | | | 190-195; | |
| DEX0477_001.aa.2 | N | 0 - o1-518; | 359-375, | MYRISTYL 72-77; | tsp_1 468-517; TSP1 |
| | | | 1.201; | MYRISTYL 106-111; | 464-518; TSP1 467-518; |
| | | | 244-254, | CK2_PHOSPHO_SITE | |
| | | | 1.038; | 461-464; | |
| | | | 211-229, | LEUCINE_ZIPPER | |
| | | | 1.203; | 271-292; MYRISTYL | |
| | | | 197-205, | 114-119; | |
| | | | 1.105; | AMIDATION 315-318; | |
| | | | 322-337, | CK2_PHOSPHO_SITE | |
| | | | 1.166; | 172-175; | |
| | | | 145-171, 1.13; | CAMP_PHOSPHO_SITE | |
| | | | 472-483, | 317-320; MYRISTYL | |
| | | | 1.114; | 477-482; MYRISTYL | |
| | | | 55-66, 1.137; | 111-116; MYRISTYL | |
| | | | 68-74, 1.05; | 69-74; | |
| | | | 389-413, | PKC_PHOSPHO_SITE | |
| | | | 1.177; | 405-407; MYRISTYL | |
| | | | 76-88, 1.104; | 291-296; MYRISTYL | |
| | | | 28-52, 1.195; | 398-403; | |
| | | | 121-141, | PKC_PHOSPHO_SITE | |
| | | | 1.098; | 321-323; | |
| | | | 231-239, | CK2_PHOSPHO_SITE | |
| | | | 1.074; 4-17, | 18-21; MYRISTYL | |
| | | | 1.16; 419-427, | 394-399; | |
| | | | 1.123; | PKC_PHOSPHO_SITE | |
| | | | 435-442, | 50-52; MYRISTYL | |
| | | | 1.156; | 355-360; MYRISTYL | |
| | | | 509-515, | 401-406; | |
| | | | 1.185; | CK2_PHOSPHO_SITE | |
| | | | 342-354, | 408-411; MYRISTYL | |
| | | | 1.119; | 203-208; MYRISTYL | |
| | | | 261-312, | 181-186; | |
| | | | 1.174; | PKC_PHOSPHO_SITE | |
| | | | 448-470, | 315-317; MYRISTYL | |
| | | | 1.146; | 474-479; | |
| | | | 489-495, | PKC_PHOSPHO_SITE | |
| | | | 1.135; | 440-442; | |
| | | | 93-107, 1.16; | | |
| DEX0477_001.aa.3 | Y | 0 - o1-298; | 215-245, | CK2_PHOSPHO_SITE | |
| | | | 1.126; 6-28, | 209-212; MYRISTYL | |
| | | | 1.22; 68-76, | 190-195; | |
| | | | 1.088; | CAMP_PHOSPHO_SITE | |
| | | | 249-260, | 144-147; MYRISTYL | |
| | | | 1.149; | 26-31; MYRISTYL | |
| | | | 114-132, | 271-276; MYRISTYL | |
| | | | 1.152; | 74-79; | |
| | | | 181-188, | CK2_PHOSPHO_SITE | |
| | | | 1.117; | 136-139; | |
| | | | 31-46, 1.092; | PKC_PHOSPHO_SITE | |
| | | | 54-66, 1.082; | 36-38; | |
| | | | 139-173, | PKC_PHOSPHO_SITE | |
| | | | 1.216; | 288-290; MYRISTYL | |
| | | | | 134-139; | |
| | | | | PKC_PHOSPHO_SITE | |
| | | | | 247-249; | |
| | | | | PKC_PHOSPHO_SITE | |
| | | | | 48-50; | |
| | | | | CK2_PHOSPHO_SITE | |
| | | | | 119-122; MYRISTYL | |
| | | | | 132-137; | |
| DEX0477_001.aa.4 | N | 0 - o1-504; | 261-312, | PKC_PHOSPHO_SITE | |
| | | | 1.174; | 315-317; MYRISTYL | |
| | | | 55-66, 1.137; | 181-186; | |
| | | | 68-74, 1.05; | CK2_PHOSPHO_SITE | |
| | | | 370-383, | 172-175; | |
| | | | 1.084; | PKC_PHOSPHO_SITE | |
| | | | 451-474, | 50-52; MYRISTYL | |
| | | | 1.106; | 203-208; | |
| | | | 211-229, | LEUCINE_ZIPPER | |
| | | | 1.203; | 271-292; | |
| | | | 427-436, | CK2_PHOSPHO_SITE | |
| | | | 1.098; | 18-21; MYRISTYL | |
| | | | 28-52, 1.195; | 291-296; MYRISTYL | |
| | | | 244-254, | 114-119; | |
| | | | 1.038; | CK2_PHOSPHO_SITE | |
| | | | 76-88, 1.104; | 392-395; | |
| | | | 121-141, | CAMP_PHOSPHO_SITE | |
| | | | 1.098; | 317-320; | |
| | | | 197-205, | AMIDATION 315-318; | |
| | | | 1.105; | MYRISTYL | |
| | | | 481-487, | 368-373; | |
| | | | 1.037; | PKC_PHOSPHO_SITE | |
| | | | 93-107, 1.16; | 321-323; MYRISTYL | |
| | | | 4-17, 1.16; | 106-111; MYRISTYL | |
| | | | 359-365, | 72-77; MYRISTYL | |
| | | | 1.039; | 402-407; MYRISTYL | |
| | | | 231-239, | 69-74; AMIDATION | |
| | | | 1.074; | 402-405; MYRISTYL | |
| | | | 342-354, | 499-504; MYRISTYL | |
| | | | 1.119; | 355-360; MYRISTYL | |
| | | | 407-413, | 111-116; | |
| | | | 1.057; | | |
| | | | 145-171, 1.13; | | |
| | | | 322-337, | | |
| | | | 1.166; | | |
| DEX0477_001.aa.7 | Y | 0 - o1-829; | 536-554, | PKC_PHOSPHO_SITE | |
| | | | 1.203; | 36-38; | |
| | | | 776-799, | PKC_PHOSPHO_SITE | |
| | | | 1.106; | 48-50; MYRISTYL | |
| | | | 68-76, 1.088; | 394-399; MYRISTYL | |
| | | | 569-579, | 693-698; MYRISTYL | |
| | | | 1.038; 6-28, | 528-533; | |
| | | | 1.22; 300-314, | CK2_PHOSPHO_SITE | |
| | | | 1.12; | 209-212; MYRISTYL | |
| | | | 139-173, | 74-79; | |
| | | | 1.216; | CK2_PHOSPHO_SITE | |
| | | | 695-708, | 497-500; MYRISTYL | |
| | | | 1.084; | 824-829; MYRISTYL | |
| | | | 752-761, | 397-402; | |
| | | | 1.098; | PKC_PHOSPHO_SITE | |
| | | | 684-690, | 375-377; MYRISTYL | |
| | | | 1.039; | 727-732; MYRISTYL | |
| | | | 380-391, | 134-139; | |
| | | | 1.137; | PKC_PHOSPHO_SITE | |
| | | | 586-637, | 298-300; MYRISTYL | |
| | | | 1.174; | 304-309; | |
| | | | 249-260, | PKC_PHOSPHO_SITE | |
| | | | 1.149; | 247-249; MYRISTYL | |
| | | | 732-738, | 190-195; | |
| | | | 1.057; | CAMP_PHOSPHO_SITE | |
| | | | 647-662, | 642-645; MYRISTYL | |
| | | | 1.166; | 271-276; MYRISTYL | |
| | | | 556-564, | 132-137; | |
| | | | 1.074; | CK2_PHOSPHO_SITE | |
| | | | 316-325, | 119-122; | |
| | | | 1.153; | CK2_PHOSPHO_SITE | |
| | | | 54-66, 1.082; | 717-720; MYRISTYL | |
| | | | 327-342, 1.16; | 436-441; | |
| | | | 353-377, | LEUCINE_ZIPPER | |
| | | | 1.195; | 596-617; | |
| | | | 393-399, 1.05; | CAMP_PHOSPHO_SITE | |
| | | | 418-432, 1.16; | 144-147; MYRISTYL | |
| | | | 114-132, | 26-31; | |
| | | | 1.152; | PKC_PHOSPHO_SITE | |
| | | | 806-812, | 646-648; MYRISTYL | |
| | | | 1.037; | 431-436; | |
| | | | 446-466, | AMIDATION 640-643; | |
| | | | 1.098; | PKC_PHOSPHO_SITE | |
| | | | 401-413, | 288-290; | |
| | | | 1.104; | AMIDATION 727-730; | |
| | | | 31-46, 1.092; | MYRISTYL | |
| | | | 470-496, 1.13; | 506-511; | |
| | | | 215-245, 1.126; | PKC_PHOSPHO_SITE | |
| | | | 522-530, | 324-326; | |
| | | | 1.105; | CK2_PHOSPHO_SITE | |
| | | | 667-679, | 343-346; MYRISTYL | |
| | | | 1.119; | 680-685; | |
| | | | 181-188, | PKC_PHOSPHO_SITE | |
| | | | 1.117; | 640-642; MYRISTYL | |
| | | | | 616-621; MYRISTYL | |
| | | | | 439-444; | |
| | | | | CK2_PHOSPHO_SITE | |
| | | | | 136-139; | |
| DEX0477_001.orf.7 | N | 0 - o1-504; | | AMIDATION 402-405; | |
| | | | | MYRISTYL | |
| | | | | 291-296; MYRISTYL | |
| | | | | 499-504; | |
| | | | | PKC_PHOSPHO_SITE | |
| | | | | 321-323; MYRISTYL | |
| | | | | 111-116; MYRISTYL | |
| | | | | 402-407; MYRISTYL | |
| | | | | 114-119; MYRISTYL | |
| | | | | 69-74; | |
| | | | | PKC_PHOSPHO_SITE | |
| | | | | 315-317; | |
| | | | | CK2_PHOSPHO_SITE | |
| | | | | 392-395; | |
| | | | | PKC_PHOSPHO_SITE | |
| | | | | 50-52; MYRISTYL | |
| | | | | 181-186; | |
| | | | | CK2_PHOSPHO_SITE | |
| | | | | 172-175; MYRISTYL | |
| | | | | 368-373; MYRISTYL | |
| | | | | 72-77; MYRISTYL | |
| | | | | 203-208; MYRISTYL | |
| | | | | 355-360; | |
| | | | | CAMP_PHOSPHO_SITE | |
| | | | | 317-320; | |
| | | | | LEUCINE_ZIPPER | |
| | | | | 271-292; MYRISTYL | |
| | | | | 106-111; | |
| | | | | AMIDATION 315-318; | |
| | | | | CK2_PHOSPHO_SITE | |
| | | | | 18-21; | |
| DEX0477_001.aa.8 | N | 0 - o1-935; | 507-519, | ASN_GLYCOSYLATION | |
| | | | 1.104; | 69-72; MYRISTYL | |
| | | | 422-431, | 542-547; MYRISTYL | |
| | | | 1.153; | 180-185; | |
| | | | 858-867, | PKC_PHOSPHO_SITE | |
| | | | 1.098; | 481-483; | |
| | | | 882-905, | CK2_PHOSPHO_SITE | |
| | | | 1.106; | 63-66; | |
| | | | 433-448, 1.16; | CK2_PHOSPHO_SITE | |
| | | | 137-152, | 449-452; MYRISTYL | |
| | | | 1.092; | 833-838; MYRISTYL | |
| | | | 773-785, | 296-301; MYRISTYL | |
| | | | 1.119; | 77-82; | |
| | | | 88-96, 1.033; | PKC_PHOSPHO_SITE | |
| | | | 220-238, | 752-754; | |
| | | | 1.152; | LEUCINE_ZIPPER | |
| | | | 552-572; | 702-723; MYRISTYL | |
| | | | 1.098; | 799-804; MYRISTYL | |
| | | | 628-636, | 500-505; | |
| | | | 1.105; | PKC_PHOSPHO_SITE | |
| | | | 912-918, | 746-748; MYRISTYL | |
| | | | 1.037; | 722-727; | |
| | | | 642-660, | CK2_PHOSPHO_SITE | |
| | | | 1.203; | 225-228; MYRISTYL | |
| | | | 576-602, 1.13; | 545-550; MYRISTYL | |
| | | | 662-670, | 2-7; | |
| | | | 1.074; | PKC_PHOSPHO_SITE | |
| | | | 486-497, | 430-432; MYRISTYL | |
| | | | 1.137; | 786-791; | |
| | | | 160-172, | CK2_PHOSPHO_SITE | |
| | | | 1.082; | 603-606; | |
| | | | 499-505, 1.05; | PKC_PHOSPHO_SITE | |
| | | | 459-483, | 404-406; | |
| | | | 1.195; | CK2_PHOSPHO_SITE | |
| | | | 838-844, | 242-245; MYRISTYL | |
| | | | 1.057; | 612-617; MYRISTYL | |
| | | | 44-65, 1.152; | 634-639; | |
| | | | 801-814, | PKC_PHOSPHO_SITE | |
| | | | 1.084; | 154-156; | |
| | | | 692-743, | ASN_GLYCOSYLATION | |
| | | | 1.174; | 84-87; | |
| | | | 406-420, 1.12; | CK2_PHOSPHO_SITE | |
| | | | 245-279, | 315-318; | |
| | | | 1.216; | PKC_PHOSPHO_SITE | |
| | | | 355-366, | 37-39; | |
| | | | 1.149; | CK2_PHOSPHO_SITE | |
| | | | 524-538, 1.16; | 823-826; MYRISTYL | |
| | | | 790-796, | 930-935; | |
| | | | 1.039; | PKC_PHOSPHO_SITE | |
| | | | 287-294, | 103-105; MYRISTYL | |
| | | | 1.117; | 503-508; | |
| | | | 753-768, | PKC_PHOSPHO_SITE | |
| | | | 1.166; | 142-144; MYRISTYL | |
| | | | 99-107, 1.14; | 82-87; | |
| | | | 321-351, | CAMP_PHOSPHO_SITE | |
| | | | 1.126; | 748-751; MYRISTYL | |
| | | | 112-134, 1.22; | 537-542; MYRISTYL | |
| | | | 174-182, | 410-415; | |
| | | | 1.088; | AMIDATION 746-749; | |
| | | | 675-685, | PKC_PHOSPHO_SITE | |
| | | | 1.038; | 353-355; MYRISTYL | |
| | | | | 377-382; RGD 5-7; | |
| | | | | MYRISTYL 132-137; | |
| | | | | PKC_PHOSPHO_SITE | |
| | | | | 394-396; | |
| | | | | CAMP_PHOSPHO_SITE | |
| | | | | 250-253; | |
| | | | | AMIDATION 833-836; | |
| | | | | MYRISTYL | |
| | | | | 240-245; MYRISTYL | |
| | | | | 238-243; | |
| DEX0477_001.orf.8 | N | 0 - o1-504; | | CK2_PHOSPHO_SITE | |
| | | | | 18-21; MYRISTYL | |
| | | | | 106-111; MYRISTYL | |
| | | | | 181-186; MYRISTYL | |
| | | | | 368-373; | |
| | | | | PKC_PHOSPHO_SITE | |
| | | | | 50-52; MYRISTYL | |
| | | | | 72-77; MYRISTYL | |
| | | | | 499-504; MYRISTYL | |
| | | | | 203-208; | |
| | | | | AMIDATION 315-318; | |
| | | | | MYRISTYL | |
| | | | | 402-407; | |
| | | | | LEUCINE_ZIPPER | |
| | | | | 271-292; MYRISTYL | |
| | | | | 69-74; | |
| | | | | PKC_PHOSPHO_SITE | |
| | | | | 315-317; | |
| | | | | PKC_PHOSPHO_SITE | |
| | | | | 321-323; MYRISTYL | |
| | | | | 291-296; MYRISTYL | |
| | | | | 111-116; | |
| | | | | CK2_PHOSPHO_SITE | |
| | | | | 172-175; | |
| | | | | AMIDATION 402-405; | |
| | | | | MYRISTYL | |
| | | | | 114-119; | |
| | | | | CK2_PHOSPHO_SITE | |
| | | | | 392-395; | |
| | | | | CAMP_PHOSPHO_SITE | |
| | | | | 317-320; MYRISTYL | |
| | | | | 355-360; | |
| DEX0477_002.orf.1 | N | 0 - o1-504; | 145-171, 1.13; | MYRISTYL 114-119; | |
| | | | 211-229, | MYRISTYL 72-77; | |
| | | | 1.203; | MYRISTYL 203-208; | |
| | | | 197-205, | CK2_PHOSPHO_SITE | |
| | | | 1.105; | 172-175; | |
| | | | 28-52, 1.195; | CAMP_PHOSPHO_SITE | |
| | | | 370-383, | 317-320; | |
| | | | 1.084; | CK2_PHOSPHO_SITE | |
| | | | 121-141, | 392-395; | |
| | | | 1.098; | AMIDATION 402-405; | |
| | | | 231-239, | MYRISTYL 69-74; | |
| | | | 1.074; 4-17, | PKC_PHOSPHO_SITE | |
| | | | 1.16; 481-487, | 50-52; MYRISTYL | |
| | | | 1.037; | 291-296; | |
| | | | 322-337, | AMIDATION 315-318; | |
| | | | 1.166; | CK2_PHOSPHO_SITE | |
| | | | 427-436, | 18-21; MYRISTYL | |
| | | | 1.098; | 402-407; MYRISTYL | |
| | | | 55-66, 1.137; | 181-186; | |
| | | | 93-107, 1.16; | PKC_PHOSPHO_SITE | |
| | | | 68-74, 1.05; | 321-323; MYRISTYL | |
| | | | 76-88, 1.104; | 499-504; MYRISTYL | |
| | | | 359-365, | 368-373; MYRISTYL | |
| | | | 1.039; | 106-111; | |
| | | | 451-474, | LEUCINE_ZIPPER | |
| | | | 1.106; | 271-292; | |
| | | | 261-312, | PKC_PHOSPHO_SITE | |
| | | | 1.174; | 315-317; MYRISTYL | |
| | | | 244-254, | 111-116; MYRISTYL | |
| | | | 1.038; | 355-360; | |
| | | | 342-354, | | |
| | | | 1.119 | | |
| | | | 407-413, | | |
| | | | 1.057; | | |
| DEX0477_002.aa.2 | N | 0 - o1-290; | 88-96, 1.033; | RGD 5-7; | |
| | | | 240-256, | CK2_PHOSPHO_SITE | |
| | | | 1.125; | 63-66; | |
| | | | 137-152, | PKC_PHOSPHO_SITE | |
| | | | 1.092; | 154-156; MYRISTYL | |
| | | | 44-65, 1.152; | 259-264; | |
| | | | 220-238, | CK2_PHOSPHO_SITE | |
| | | | 1.152; | 265-268; | |
| | | | 112-134, 1.22; | ASN_GLYCOSYLATION | |
| | | | 99-107, 1.14; | 69-72; MYRISTYL | |
| | | | 174-182, | 277-282; | |
| | | | 1.088; | PKC_PHOSPHO_SITE | |
| | | | 160-172, | 103-105; MYRISTYL | |
| | | | 1.082; | 77-82; | |
| | | | | ASN_GLYCOSYLATION | |
| | | | | 84-87; MYRISTYL | |
| | | | | 2-7; | |
| | | | | PKC_PHOSPHO_SITE | |
| | | | | 37-39; MYRISTYL | |
| | | | | 180-185; | |
| | | | | CK2_PHOSPHO_SITE | |
| | | | | 281-284; | |
| | | | | PKC_PHOSPHO_SITE | |
| | | | | 142-144; MYRISTYL | |
| | | | | 252-257; | |
| | | | | CK2_PHOSPHO_SITE | |
| | | | | 225-228; MYRISTYL | |
| | | | | 82-87; MYRISTYL | |
| | | | | 132-137; | |
| DEX0477_001.orf.9 | N | 0 - o1-504; | | CAMP_PHOSPHO_SITE | |
| | | | | 317-320; MYRISTYL | |
| | | | | 355-360; MYRISTYL | |
| | | | | 368-373; MYRISTYL | |
| | | | | 69-74; MYRISTYL | |
| | | | | 114-119; MYRISTYL | |
| | | | | 291-296; | |
| | | | | AMIDATION 315-318; | |
| | | | | PKC_PHOSPHO_SITE | |
| | | | | 321-323; MYRISTYL | |
| | | | | 72-77; MYRISTYL | |
| | | | | 499-504; | |
| | | | | CK2_PHOSPHO_SITE | |
| | | | | 18-21; AMIDATION | |
| | | | | 402-405; | |
| | | | | CK2_PHOSPHO_SITE | |
| | | | | 172-175; | |
| | | | | PKC_PHOSPHO_SITE | |
| | | | | 315-317; MYRISTYL | |
| | | | | 203-208; MYRISTYL | |
| | | | | 106-111; | |
| | | | | LEUCINE_ZIPPER | |
| | | | | 271-292; MYRISTYL | |
| | | | | 402-407; | |
| | | | | PKC_PHOSPHO_SITE | |
| | | | | 50-52; MYRISTYL | |
| | | | | 181-186; | |
| | | | | CK2_PHOSPHO_SITE | |
| | | | | 392-395; MYRISTYL | |
| | | | | 111-116; | |
| DEX0477_003.aa.1 | N | 0 - o1-292; | 128-134, | CK2_PHOSPHO_SITE | Asparaginase_2 1-275; |
| | | | 1.052; | 43-46; MYRISTYL | |
| | | | 44-56, 1.143; | 187-192; MYRISTYL | |
| | | | 252-259, | 167-172; MYRISTYL | |
| | | | 1.124; | 26-31; MYRISTYL | |
| | | | 191-197, | 214-219; | |
| | | | 1.046; | CK2_PHOSPHO_SITE | |
| | | | 223-249, | 80-83; MYRISTYL | |
| | | | 1.165; | 268-273; | |
| | | | 214-219, | CK2_PHOSPHO_SITE | |
| | | | 1.043; | 71-74; MYRISTYL | |
| | | | 88-120, 1.203; | 156-161; MYRISTYL | |
| | | | 4-10, 1.192; | 269-274; MYRISTYL | |
| | | | 168-183, | 50-55; | |
| | | | 1.138; | PKC_PHOSPHO_SITE | |
| | | | 264-289, 1.19; | 141-143; MYRISTYL | |
| | | | 199-206, | 66-71; MYRISTYL | |
| | | | 1.123; | 90-95; MYRISTYL | |
| | | | 30-38, 1.086; | 253-258; | |
| DEX0477_003.aa.2 | N | 0 - o1-106; | 66-83, 1.17; | AMIDATION 22-25; | |
| | | | 56-62, 1.125; | PKC_PHOSPHO_SITE | |
| | | | 14-19, 1.061; | 79-81; | |
| DEX0477_004.aa.1 | Y | 0 - o1-186; | 173-183, 1.14; | PKC_PHOSPHO_SITE | HIS_RICH 116-142; |
| | | | 35-46, 1.168; | 167-169; MYRISTYL | |
| | | | 6-27, 1.253; | 69-74; | |
| | | | 75-92, 1.216; | CK2_PHOSPHO_SITE | |
| | | | 49-61, 1.087; | 144-147; MYRISTYL | |
| | | | 151-169, | 57-62; AMIDATION | |
| | | | 1.121; | 3-6; | |
| | | | 97-148, 1.235; | PKC_PHOSPHO_SITE | |
| | | | | 99-101; | |
| DEX0477_005.aa.1 | N | 0 - o1-119; | 56-116, 1.2; | LEUCINE_ZIPPER | |
| | | | 13-50, 1.189; | 89-110; | |
| | | | | CK2_PHOSPHO_SITE | |
| | | | | 99-102; | |
| | | | | PKC_PHOSPHO_SITE | |
| | | | | 52-54; MYRISTYL | |
| | | | | 51-56; | |
| | | | | PKC_PHOSPHO_SITE | |
| | | | | 84-86; | |
| | | | | CK2_PHOSPHO_SITE | |
| | | | | 98-101; MYRISTYL | |
| | | | | 58-63; MYRISTYL | |
| | | | | 49-54; | |
| DEX0477_005.orf.1 | N | 0 - o1-199; | 16-24, 1.121; | CK2_PHOSPHO_SITE | |
| | | | 82-88, 1.095; | 179-182; MYRISTYL | |
| | | | 4-9, 1.149; | 52-57; | |
| | | | 136-196, 1.2; | PKC_PHOSPHO_SITE | |
| | | | 72-80, 1.153; | 68-70; | |
| | | | 54-67, 1.094; | PKC_PHOSPHO_SITE | |
| | | | 93-130, 1.189; | 132-134; | |
| | | | | PKC_PHOSPHO_SITE | |
| | | | | 35-37; | |
| | | | | LEUCINE_ZIPPER | |
| | | | | 169-190; | |
| | | | | CK2_PHOSPHO_SITE | |
| | | | | 35-38; MYRISTYL | |
| | | | | 138-143; | |
| | | | | CAMP_PHOSPHO_SITE | |
| | | | | 8-11; | |
| | | | | PKC_PHOSPHO_SITE | |
| | | | | 164-166; | |
| | | | | CK2_PHOSPHO_SITE | |
| | | | | 41-44; MYRISTYL | |
| | | | | 131-136; | |
| | | | | CK2_PHOSPHO_SITE | |
| | | | | 13-16; MYRISTYL | |
| | | | | 129-134; | |
| | | | | CK2_PHOSPHO_SITE | |
| | | | | 178-181; | |
| DEX0477_006.aa.1 | Y | 0 - o1-234; | 98-109, 1.098; | PKC_PHOSPHO_SITE | |
| | | | 167-173, | 36-38; | |
| | | | 1.033; | CK2_PHOSPHO_SITE | |
| | | | 13-33, 1.145; | 104-107; | |
| | | | 46-84, 1.134; | PKC_PHOSPHO_SITE | |
| | | | 196-203, | 181-183; | |
| | | | 1.107; | CK2_PHOSPHO_SITE | |
| | | | 211-222, | 169-172; MYRISTYL | |
| | | | 1.207; | 165-170; MYRISTYL | |
| | | | 148-156, | 228-233; | |
| | | | 1.062; 5-11, | CK2_PHOSPHO_SITE | |
| | | | 1.082; | 34-37; | |
| | | | | PKC_PHOSPHO_SITE | |
| | | | | 76-78; | |
| | | | | CK2_PHOSPHO_SITE | |
| | | | | 124-127; | |
| | | | | PKC_PHOSPHO_SITE | |
| | | | | 207-209; | |
| | | | | PKC_PHOSPHO_SITE | |
| | | | | 135-137; | |
| | | | | CK2_PHOSPHO_SITE | |
| | | | | 9-12; | |
| | | | | CK2_PHOSPHO_SITE | |
| | | | | 119-122; MYRISTYL | |
| | | | | 87-92; | |
| | | | | CK2_PHOSPHO_SITE | |
| | | | | 201-204; | |
| | | | | PKC_PHOSPHO_SITE | |
| | | | | 173-175; | |
| | | | | PKC_PHOSPHO_SITE | |
| | | | | 124-126; | |
| | | | | CK2_PHOSPHO_SITE | |
| | | | | 113-116; MYRISTYL | |
| | | | | 91-96; MYRISTYL | |
| | | | | 190-195; | |
| | | | | CK2_PHOSPHO_SITE | |
| | | | | 22-25; | |
| DEX0477_006.orf.1 | N | 0 - o1-201; | 115-123, | PKC_PHOSPHO_SITE | |
| | | | 1.062; | 174-176; | |
| | | | 163-170, | CK2_PHOSPHO_SITE | |
| | | | 1.107; | 4-7; MYRISTYL | |
| | | | 13-51, 1.134; | 132-137; | |
| | | | 178-189, | PKC_PHOSPHO_SITE | |
| | | | 1.207; | 148-150; | |
| | | | 65-76, 1.098; | CK2_PHOSPHO_SITE | |
| | | | 134-140, | 71-74; | |
| | | | 1.033; | CK2_PHOSPHO_SITE | |
| | | | | 168-171; MYRISTYL | |
| | | | | 58-63; | |
| | | | | PKC_PHOSPHO_SITE | |
| | | | | 43-45; MYRISTYL | |
| | | | | 54-59; | |
| | | | | PKC_PHOSPHO_SITE | |
| | | | | 102-104; | |
| | | | | CK2_PHOSPHO_SITE | |
| | | | | 136-139; | |
| | | | | PKC_PHOSPHO_SITE | |
| | | | | 91-93; | |
| | | | | CK2_PHOSPHO_SITE | |
| | | | | 80-83; | |
| | | | | PKC_PHOSPHO_SITE | |
| | | | | 140-142; MYRISTYL | |
| | | | | 195-200; | |
| | | | | CK2_PHOSPHO_SITE | |
| | | | | 86-89; MYRISTYL | |
| | | | | 157-162; | |
| | | | | CK2_PHOSPHO_SITE | |
| | | | | 91-94; | |
| DEX0477_007.aa.1 | N | 0 - o1-159; | 62-72, 1.129, | MYRISTYL 76-81; | MAJORURINARY 140-157; |
| | | | 99-107, 1.117; | MYRISTYL 67-72; | A1MCGLOBULIN |
| | | | 4-10, 1.074; | MYRISTYL 14-19; | 82-101; |
| | | | 81-95, 1.206; | MYRISTYL 141-146; | PGNDSYNTHASE 80-103; |
| | | | 54-60, 1.056; | CAMP_PHOSPHO_SITE | A1MCGLOBULIN |
| | | | 136-156, | 105-108; | 113-134; |
| | | | 1.184; | PKC_PHOSPHO_SITE | A1MCGLOBULIN 141-159; |
| | | | 39-52, 1.093; | 20-22; | lipocalin 13-156; |
| | | | 23-35, 1.144; | ASN_GLYCOSYLATION | PGNDSYNTHASE |
| | | | | 21-24; | 132-150; LIPOCALIN |
| | | | | | 91-103; |
| | | | | | PGNDSYNTHASE 115-129; |
| | | | | | LIPOCALIN 118-133; |
| | | | | | MAJORURINARY |
| | | | | | 112-133; |
| | | | | | MAJORURINARY 91-106; |
| DEX0477_007.orf.1 | N | 0 - o1-158; | 98-106, 1.117; | MYRISTYL 66-71; | MAJORURINARY 139-156; |
| | | | 38-51, 1.093; | ASN_GLYCOSYLATION | PGNDSYNTHASE |
| | | | 53-59, 1.056; | 20-23; MYRISTYL | 131-149; |
| | | | 135-155, | 13-18; | MAJORURINARY 111-132; |
| | | | 1.184; | CAMP_PHOSPHO_SITE | lipocalin 12-155; |
| | | | 80-94, 1.206; | 104-107; MYRISTYL | A1MCGLOBULIN |
| | | | 61-71, 1.129, | 1-6; MYRISTYL 75-80; | 112-133; LIPOCALIN |
| | | | 22-34, 1.144; | PKC_PHOSPHO_SITE | 117-132; |
| | | | | 2-4; | PGNDSYNTHASE 114-128; |
| | | | | PKC_PHOSPHO_SITE | LIPOCALIN 90-102; |
| | | | | 19-21; MYRISTYL | A1MCGLOBULIN |
| | | | | 140-145; | 140-158; |
| | | | | | A1MCGLOBULIN 81-100; |
| | | | | | MAJORURINARY |
| | | | | | 90-105; |
| | | | | | PGNDSYNTHASE 79-102; |
| DEX0477_008.aa.1 | N | 0 - o1-229; | 92-99, 1.087; | MYRISTYL 149-154; | COLLAGEN_REP 44-78; |
| | | | 219-226, | PKC_PHOSPHO_SITE | |
| | | | 1.105; | 18-20; MYRISTYL | |
| | | | 192-207, | 103-108; | |
| | | | 1.161; 7-15, | PKC_PHOSPHO_SITE | |
| | | | 1.073; | 9-11; MYRISTYL | |
| | | | 152-166, | 31-36; MYRISTYL | |
| | | | 1.118; | 189-194; | |
| | | | 29-36, 1.123; | CK2_PHOSPHO_SITE | |
| | | | 77-82, 1.049; | 83-86; | |
| | | | 122-144, | CK2_PHOSPHO_SITE | |
| | | | 1.138; | 181-184; | |
| | | | 39-48, 1.079; | CK2_PHOSPHO_SITE | |
| | | | 183-190, | 203-206; MYRISTYL | |
| | | | 1.113; | 185-190; | |
| | | | | ASN_GLYCOSYLATION | |
| | | | | 172-175; MYRISTYL | |
| | | | | 53-58; | |
| | | | | PKC_PHOSPHO_SITE | |
| | | | | 130-132; | |
| DEX0477_009.aa.1 | N | 0 - o1-214; | 148-181, 1.13; | CK2_PHOSPHO_SITE | Flavodoxin_2 4-207; |
| | | | 65-97, 1.148; | 192-195; | |
| | | | 100-114, | PKC_PHOSPHO_SITE | |
| | | | 1.073; | 13-15; MYRISTYL | |
| | | | 35-42, 1.129; | 132-137; | |
| | | | 137-143, | CK2_PHOSPHO_SITE | |
| | | | 1.081; | 52-55; | |
| | | | 194-200, | ASN_GLYCOSYLATION | |
| | | | 1.048; | 211-214; | |
| | | | 202-211, 1.14; | PKC_PHOSPHO_SITE | |
| | | | 123-129, | 122-124; MYRISTYL | |
| | | | 1.103; | 135-140; | |
| | | | 26-31, 1.071; | PKC_PHOSPHO_SITE | |
| | | | 4-13, 1.181; | 57-59; AMIDATION | |
| | | | | 2-5; | |
| | | | | PKC_PHOSPHO_SITE | |
| | | | | 52-54; | |
| DEX0477_009.orf.1 | N | 0 - o1-172; | | PKC_PHOSPHO_SITE | |
| | | | | 40-42; | |
| | | | | PKC_PHOSPHO_SITE | |
| | | | | 126-128; | |
| | | | | PKC_PHOSPHO_SITE | |
| | | | | 165-167; | |
| | | | | AMIDATION 115-118; | |
| | | | | AMIDATION | |
| | | | | 143-146; MYRISTYL | |
| | | | | 56-61; | |
| | | | | PKC_PHOSPHO_SITE | |
| | | | | 17-19; | |
| | | | | PKC_PHOSPHO_SITE | |
| | | | | 75-77; | |
| | | | | PKC_PHOSPHO_SITE | |
| | | | | 144-146; MYRISTYL | |
| | | | | 112-117; | |
| | | | | CK2_PHOSPHO_SITE | |
| | | | | 165-168; | |
| DEX0477_010.aa.1 | Y | 0 - o1-440; | 275-281, | CK2_PHOSPHO_SITE | THIOREDOXIN 46-54; |
| | | | 1.087; | 23-26; MYRISTYL | THIOREDOXIN 233-244; |
| | | | 316-326, | 7-12; | pdi_dom 165-269; |
| | | | 1.166; | CK2_PHOSPHO_SITE | thiored 24-132; |
| | | | 214-232, | 248-251; | THIOREDOXIN |
| | | | 1.143; | CK2_PHOSPHO_SITE | 182-200; |
| | | | 369-375, | 158-161; | THIOREDOXIN 189-198; |
| | | | 1.067; | CK2_PHOSPHO_SITE | ER_TARGET 437-440; |
| | | | 395-401, | 375-378; | THIOREDOXIN_2_1 26-137; |
| | | | 1.032; | PKC_PHOSPHO_SITE | THIOREDOXIN_2_2 |
| | | | 121-138, | 148-150; MYRISTYL | 161-284; |
| | | | 1.121; | 401-406; MYRISTYL | THIOREDOXIN 47-65; |
| | | | 159-165, | 105-110; | pdi_dom 30-131; |
| | | | 1.052; | CK2_PHOSPHO_SITE | thiored 159-270; |
| | | | 418-424, | 22-25; MYRISTYL | |
| | | | 1.062; | 19-24; | |
| | | | 259-269, 1.1; | CK2_PHOSPHO_SITE | |
| | | | 38-61, 1.134; | 257-260; | |
| | | | 180-196, | PKC_PHOSPHO_SITE | |
| | | | 1.118; | 158-160; | |
| | | | 86-103, 1.07; | PKC_PHOSPHO_SITE | |
| | | | 403-409, | 157-159; MYRISTYL | |
| | | | 1.077; | 140-145; MYRISTYL | |
| | | | 69-84, 1.2; | 79-84; | |
| | | | 201-207, | PKC_PHOSPHO_SITE | |
| | | | 1.072; | 100-102; MYRISTYL | |
| | | | 292-308, | 90-95; MYRISTYL | |
| | | | 1.304; | 116-121; | |
| | | | 427-433, | CK2_PHOSPHO_SITE | |
| | | | 1.068; 4-31, | 315-318; | |
| | | | 1.234; | PKC_PHOSPHO_SITE | |
| | | | 172-178, | 106-108; | |
| | | | 1.087; | CK2_PHOSPHO_SITE | |
| | | | | 405-408; | |
| | | | | CK2_PHOSPHO_SITE | |
| | | | | 290-293; | |
| | | | | CK2_PHOSPHO_SITE | |
| | | | | 343-346; MYRISTYL | |
| | | | | 144-149; | |
| | | | | PKC_PHOSPHO_SITE | |
| | | | | 239-241; | |
| | | | | CK2_PHOSPHO_SITE | |
| | | | | 428-431; | |
| DEX0477_010.orf.1 | Y | 1 - i1-20; | 439-445, | MYRISTYL 111-116; | THIOREDOXIN_2_2 |
| | | tm21-43; | 1.062; 4-10, | CK2_PHOSPHO_SITE | 182-305; ER_TARGET |
| | | o44-461; | 1.131; 23-52, | 336-339; | 458-461; |
| | | | 1.223; | CK2_PHOSPHO_SITE | THIOREDOXIN 210-219; |
| | | | 193-199, | 43-46; | THIOREDOXIN |
| | | | 1.087; | CK2_PHOSPHO_SITE | 67-75; |
| | | | 416-422, | 44-47; MYRISTYL | THIOREDOXIN_2_1 47-158; |
| | | | 1.032; | 100-105; | pdi_dom 186-290; |
| | | | 180-186, | CK2_PHOSPHO_SITE | pdi_dom 51-152; |
| | | | 1.052; | 364-367; | thiored 180-291; |
| | | | 313-329, | CK2_PHOSPHO_SITE | THIOREDOXIN |
| | | | 1.304; | 179-182; | 68-86; THIOREDOXIN |
| | | | 142-159, | CK2_PHOSPHO_SITE | 203-221; |
| | | | 1.121; | 311-314; MYRISTYL | THIOREDOXIN 254-265; |
| | | | 201-217, | 126-131; | thiored 45-153; |
| | | | 1.118; | CK2_PHOSPHO_SITE | |
| | | | 222-228, | 278-281; MYRISTYL | |
| | | | 1.072; | 137-142; | |
| | | | 424-430, | CK2_PHOSPHO_SITE | |
| | | | 1.077; | 269-272; MYRISTYL | |
| | | | 280-290, 1.1; | 161-166; | |
| | | | 107-124, 1.07; | PKC_PHOSPHO_SITE | |
| | | | 296-302, | 179-181; | |
| | | | 1.087; | PKC_PHOSPHO_SITE | |
| | | | 12-18, 1.053; | 260-262; | |
| | | | 90-105, 1.2; | CK2_PHOSPHO_SITE | |
| | | | 390-396, | 426-429; MYRISTYL | |
| | | | 1.067; | 28-33; MYRISTYL | |
| | | | 448-454, | 40-45; | |
| | | | 1.068; | CK2_PHOSPHO_SITE | |
| | | | 59-82, 1.134; | 396-399; MYRISTYL | |
| | | | 337-347, | 165-170; | |
| | | | 1.166; | PKC_PHOSPHO_SITE | |
| | | | 235-253, | 178-180; | |
| | | | 1.143; | CK2_PHOSPHO_SITE | |
| | | | | 449-452; MYRISTYL | |
| | | | | 422-427; | |
| | | | | PKC_PHOSPHO_SITE | |
| | | | | 121-123; | |
| | | | | PKC_PHOSPHO_SITE | |
| | | | | 127-129; | |
| | | | | PKC_PHOSPHO_SITE | |
| | | | | 169-171; | |
| DEX0477_011.aa.1 | N | 0 - o1-97; | 4-23, 1.167; | MYRISTYL 47-52; | KRAB 13-62; KRAB |
| | | | 47-63, 1.124; | PKC_PHOSPHO_SITE | 13-53; KRAB 13-97; |
| | | | 84-94, 1.122; | 71-73; | |
| | | | 27-36, 1.119; | CK2_PHOSPHO_SITE | |
| | | | | 14-17; MYRISTYL | |
| | | | | 44-49; | |
| | | | | CK2_PHOSPHO_SITE | |
| | | | | 23-26; | |
| DEX0477_012.aa.1 | N | 0 - o1-81; | 9-40, 1.109; | MYRISTYL 74-79; | UBIQUITIN_2 11-73; |
| | | | 48-67, 1.114; | CK2_PHOSPHO_SITE | UBIQUITIN 50-71; |
| | | | | 10-13; | UBIQUITIN 29-49; |
| | | | | CK2_PHOSPHO_SITE | UBIQUITIN 8-28; UBQ |
| | | | | 28-31; | 5-69; ubiquitin 3-71; |
| | | | | LEUCINE_ZIPPER | |
| | | | | 16-37; | |
| DEX0477_012.orf.1 | N | 0 - i1-102; | 30-41, 1.131; | MYRISTYL 13-18; | |
| | | | 6-14, 1.086; | MYRISTYL 94-99; | |
| | | | 52-68, 1.078; | PKC_PHOSPHO_SITE | |
| | | | | 26-28; MYRISTYL | |
| | | | | 30-35; | |
| | | | | PKC_PHOSPHO_SITE | |
| | | | | 86-88; AMIDATION | |
| | | | | 70-73; MYRISTYL | |
| | | | | 90-95; | |
| DEX0477_013.aa.1 | N | 0 - o1-709; | 633-639, | CK2_PHOSPHO_SITE | |
| | | | 1.079; | 14-17; | |
| | | | 248-256, | CK2_PHOSPHO_SITE | |
| | | | 1.082; | 85-88; | |
| | | | 700-706, | PKC_PHOSPHO_SITE | |
| | | | 1.131; | 450-452; | |
| | | | 404-412, | PKC_PHOSPHO_SITE | |
| | | | 1.107; | 149-151; | |
| | | | 260-265, | CK2_PHOSPHO_SITE | |
| | | | 1.047; | 173-176; | |
| | | | 461-477, | CK2_PHOSPHO_SITE | |
| | | | 1.161; | 389-392; | |
| | | | 425-439, | PKC_PHOSPHO_SITE | |
| | | | 1.087; | 73-75; | |
| | | | 274-286, | ASN_GLYCOSYLATION | |
| | | | 1.112; | 16-19; | |
| | | | 156-164, | PKC_PHOSPHO_SITE | |
| | | | 1.108; | 475-477; | |
| | | | 393-399, | PKC_PHOSPHO_SITE | |
| | | | 1.113; | 18-20; | |
| | | | 531-558, | CK2_PHOSPHO_SITE | |
| | | | 1.095; | 363-366; | |
| | | | 665-670, | PKC_PHOSPHO_SITE | |
| | | | 1.032; | 503-505; | |
| | | | 335-341, | CK2_PHOSPHO_SITE | |
| | | | 1.096; | 325-328; | |
| | | | 575-581, | CK2_PHOSPHO_SITE | |
| | | | 1.125; | 295-298; | |
| | | | 653-659, | PKC_PHOSPHO_SITE | |
| | | | 1.075; | 582-584; | |
| | | | 177-183, | PKC_PHOSPHO_SITE | |
| | | | 1.118; | 325-327; | |
| | | | 511-519, | PKC_PHOSPHO_SITE | |
| | | | 1.087; | 571-573; | |
| | | | 220-227, | CK2_PHOSPHO_SITE | |
| | | | 1.052; | 503-506; MYRISTYL | |
| | | | 18-31, 1.113; | 655-660; | |
| | | | 55-63, 1.166; | CK2_PHOSPHO_SITE | |
| | | | 126-139, | 607-610; | |
| | | | 1.142; | PKC_PHOSPHO_SITE | |
| | | | 43-49, 1.053; | 266-268; | |
| | | | 672-689, | PKC_PHOSPHO_SITE | |
| | | | 1.112; | 539-541; | |
| | | | 304-310, | AMIDATION 41-44; | |
| | | | 1.073; | PKC_PHOSPHO_SITE | |
| | | | 445-459, | 97-99; | |
| | | | 1.164; | CK2_PHOSPHO_SITE | |
| | | | 584-590, 1.07; | 147-150; | |
| | | | 113-122, | ASN_GLYCOSYLATION | |
| | | | 1.138; | 323-326; | |
| | | | 623-628, 1.07; | CK2_PHOSPHO_SITE | |
| | | | 483-488, | 71-74; | |
| | | | 1.064; | CK2_PHOSPHO_SITE | |
| | | | 199-205, | 658-661; | |
| | | | 1.166; 4-13, | ASN_GLYCOSYLATION | |
| | | | 1.126; | 569-572; MYRISTYL | |
| | | | 377-383, | 612-617; | |
| | | | 1.073; | CK2_PHOSPHO_SITE | |
| | | | | 387-390; | |
| DEX0477_013.orf.1 | N | 0 - o1-413; | 284-289, | CK2_PHOSPHO_SITE | |
| | | | 1.047; | 349-352; | |
| | | | 359-365, | ASN_GLYCOSYLATION | |
| | | | 1.096; | 408-411; | |
| | | | 137-146, | PKC_PHOSPHO_SITE | |
| | | | 1.138; | 290-292; | |
| | | | 28-37, 1.126; | CK2_PHOSPHO_SITE | |
| | | | 401-407, | 319-322; | |
| | | | 1.073; | ASN_GLYCOSYLATION | |
| | | | 328-334, | 347-350; | |
| | | | 1.073; | CK2_PHOSPHO_SITE | |
| | | | 67-73, 1.053; | 38-41; | |
| | | | 244-251, | ASN_GLYCOSYLATION | |
| | | | 1.052; | 40-43; | |
| | | | 272-280, | CK2_PHOSPHO_SITE | |
| | | | 1.082; | 171-174; | |
| | | | 150-163, | PKC_PHOSPHO_SITE | |
| | | | 1.142; | 121-123; | |
| | | | 180-188, | AMIDATION 65-68; | |
| | | | 1.108; | PKC_PHOSPHO_SITE | |
| | | | 201-207, | 97-99; | |
| | | | 1.118; | CK2_PHOSPHO_SITE | |
| | | | 223-229, | 387-390; | |
| | | | 1.166; | PKC_PHOSPHO_SITE | |
| | | | 42-55, 1.113; | 42-44; | |
| | | | 79-87, 1.166; | CK2_PHOSPHO_SITE | |
| | | | 4-22, 1.4; | 95-98; | |
| | | | 298-310, | CK2_PHOSPHO_SITE | |
| | | | 1.112; | 109-112; | |
| | | | | PKC_PHOSPHO_SITE | |
| | | | | 173-175; | |
| | | | | PKC_PHOSPHO_SITE | |
| | | | | 349-351; | |
| | | | | CK2_PHOSPHO_SITE | |
| | | | | 197-200; | |
| DEX0477_014.aa.1 | N | 0 - o1-128; | 74-91, 1.138; | PKC_PHOSPHO_SITE | |
| | | | 26-36, 1.125; | 48-50; MYRISTYL | |
| | | | 109-125, | 36-41; MYRISTYL | |
| | | | 1.138; | 55-60; MYRISTYL | |
| | | | 58-64, 1.065; | 4-9; | |
| | | | 7-16, 1.101; | | |
| DEX0477_014.orf.1 | N | 0 - i1-94; | | MYRISTYL 21-26; | |
| | | | | PKC_PHOSPHO_SITE | |
| | | | | 14-16; | |
| DEX0477_014.aa.2 | N | 0 - o1-118; | 64-81, 1.138; | MYRISTYL 26-31; | |
| | | | 48-54, 1.065; | PKC_PHOSPHO_SITE | |
| | | | 7-16, 1.101; | 38-40; MYRISTYL | |
| | | | 99-115, 1.138; | 45-50; MYRISTYL | |
| | | | | 4-9; | |
| DEX0477_014.orf.2 | N | 0 - i1-100; | 30-36, 1.065; | MYRISTYL 27-32; | |
| | | | 46-63, 1.138; | PKC_PHOSPHO_SITE | |
| | | | 7-12, 1.007; | 20-22; | |
| | | | 81-97, 1.138; | | |
| DEX0477_014.aa.3 | N | 0 - i1-30; | 4-11, 1.129; | PKC_PHOSPHO_SITE | |
| | | | | 25-27; | |
| | | | | ASN_GLYCOSYLATION | |
| | | | | 23-26; MYRISTYL | |
| | | | | 16-21; | |
| DEX0477_014.orf.3 | N | 0 - o1-84; | | AMIDATION 9-12; | |
| DEX0477_015.aa.1 | N | 0 - o1-145; | 22-32, 1.149; | CK2_PHOSPHO_SITE | trefoil 96-137; |
| | | | 72-115, 1.137; | 113-116; | P_TREFOIL 104-124; |
| | | | 38-69, 1.208; | TYR_PHOSPHO_SITE | PD 95-141; |
| | | | 128-142, 1.12; | 102-109; MYRISTYL | sp_Q07654_ITF_HUMAN |
| | | | 120-126, | 130-135; | 72-145; PTREFOIL |
| | | | 1.117; | PKC_PHOSPHO_SITE | 125-137; PTREFOIL |
| | | | | 9-11; | 113-125; PTREFOIL |
| | | | | PKC_PHOSPHO_SITE | 101-113; |
| | | | | 113-115; MYRISTYL | |
| | | | | 91-96; | |
| | | | | PKC_PHOSPHO_SITE | |
| | | | | 36-38; | |
| | | | | CAMP_PHOSPHO_SITE | |
| | | | | 11-14; MYRISTYL | |
| | | | | 6-11; | |
| | | | | CK2_PHOSPHO_SITE | |
| | | | | 70-73; MYRISTYL | |
| | | | | 60-65; | |
| | | | | CK2_PHOSPHO_SITE | |
| | | | | 69-72; MYRISTYL | |
| | | | | 87-92; | |
| DEX0477_015.aa.2 | N | 0 - i1-91; | 72-83, 1.125; | CAMP_PHOSPHO_SITE | |
| | | | 38-69, 1.208; | 11-14; | |
| | | | 22-32, 1.149; | CK2_PHOSPHO_SITE | |
| | | | | 69-72; MYRISTYL | |
| | | | | 6-11; | |
| | | | | PKC_PHOSPHO_SITE | |
| | | | | 36-38; | |
| | | | | CK2_PHOSPHO_SITE | |
| | | | | 70-73; MYRISTYL | |
| | | | | 60-65; | |
| | | | | PKC_PHOSPHO_SITE | |
| | | | | 9-11; | |
| DEX0477_016.aa.1 | N | 2 - o1-614; | 368-396, | PKC_PHOSPHO_SITE | Furin-like 151-305; |
| | | tm615-637; | 1.131; | 722-724; | TYRKINASE 846-856; |
| | | i638-733; | 781-791, | CK2_PHOSPHO_SITE | S_TKc 682-939; |
| | | tm734-756; | 1.074; | 595-598; | Recep_L_domain 328-458; |
| | | o757-1217; | 946-953, | CK2_PHOSPHO_SITE | TYRKINASE 865-887; |
| | | | 1.137; | 364-367; | TyrKc 682-938; |
| | | | 1058-1074, | CK2_PHOSPHO_SITE | TYRKINASE 909-931; |
| | | | 1.086; | 796-799; | CYS_RICH 154-230; |
| | | | 843-850, | PKC_PHOSPHO_SITE | TYRKINASE 797-815; |
| | | | 1.045; | 1198-1200; | YLP 982-990; |
| | | | 864-877, | CK2_PHOSPHO_SITE | PRO_RICH 1064-1196; |
| | | | 1.088; | 1084-1087; | TYRKINASE 760-773; |
| | | | 958-965, | CK2_PHOSPHO_SITE | FU 463-514; |
| | | | 1.083; | 170-173; | PROTEIN_KINASE_TYR |
| | | | 100-110, | CK2_PHOSPHO_SITE | 803-815; FU 194-237; |
| | | | 1.122; | 419-422; | FU 151-192; |
| | | | 810-826, | CK2_PHOSPHO_SITE | sp_P04626_ERB2_HUMAN |
| | | | 1.114; | 144-147; | 686-945; pkinase |
| | | | 693-700, | CK2_PHOSPHO_SITE | 682-939; YLP 1155-1163; |
| | | | 1.078; | 960-963; | EF_HAND 973-985; |
| | | | 452-459, | CK2_PHOSPHO_SITE | PROTEIN_KINASE_ATP |
| | | | 1.122; | 969-972; | 688-715; FU 519-568; |
| | | | 140-146, | CK2_PHOSPHO_SITE | PROTEIN_KINASE_DOM |
| | | | 1.127; | 285-288; | 682-949; |
| | | | 211-236, | CK2_PHOSPHO_SITE | |
| | | | 1.226; | 873-876; MYRISTYL | |
| | | | 499-516, | 630-635; | |
| | | | 1.166; | CAMP_PHOSPHO_SITE | |
| | | | 77-85, 1.071; | 859-862; MYRISTYL | |
| | | | 312-321, | 534-539; | |
| | | | 1.098; | TYR_PHOSPHO_SITE | |
| | | | 731-772, | 727-734; | |
| | | | 1.172; | PKC_PHOSPHO_SITE | |
| | | | 152-161, | 1013-1015; | |
| | | | 1.162; | CK2_PHOSPHO_SITE | |
| | | | 1117-1124, | 1113-1116; | |
| | | | 1.063; | PKC_PHOSPHO_SITE | |
| | | | 543-577, | 61-63; | |
| | | | 1.229; | ASN_GLYCOSYLATION | |
| | | | 1166-1177, | 149-152; | |
| | | | 1.074; | CK2_PHOSPHO_SITE | |
| | | | 798-808, | 19-22; MYRISTYL | |
| | | | 1.122; | 749-754; | |
| | | | 584-607, | ASN_GLYCOSYLATION | |
| | | | 1.169; | 221-224; | |
| | | | 708-717, | CK2_PHOSPHO_SITE | |
| | | | 1.175; | 1028-1031; | |
| | | | 1034-1040, | PKC_PHOSPHO_SITE | |
| | | | 1.056; | 1113-1115; | |
| | | | 254-283, 1.24; | PKC_PHOSPHO_SITE | |
| | | | 1003-1009, | 4-6; MYRISTYL | |
| | | | 1.065; | 1055-1060; | |
| | | | 41-54, 1.174; | ASN_GLYCOSYLATION | |
| | | | 464-485, | 533-536; MYRISTYL | |
| | | | 1.215; | 1018-1023; | |
| | | | 979-998, | MYRISTYL 691-696; | |
| | | | 1.109; | ASN_GLYCOSYLATION | |
| | | | 425-446, | 591-594; MYRISTYL | |
| | | | 1.219; | 1024-1029; | |
| | | | 293-307, | PKC_PHOSPHO_SITE | |
| | | | 1.196; | 12-14; MYRISTYL | |
| | | | 28-37, 1.094; | 1053-1058; | |
| | | | 487-497, | MYRISTYL 666-671; | |
| | | | 1.157; | CAMP_PHOSPHO_SITE | |
| | | | 655-664, 1.11; | 645-648; | |
| | | | 326-342, 1.09; | ASN_GLYCOSYLATION | |
| | | | 932-938, | 492-495; | |
| | | | 1.067; | AMIDATION 84-87; | |
| | | | 610-639, | PKC_PHOSPHO_SITE | |
| | | | 1.293; | 419-421; MYRISTYL | |
| | | | 194-209, | 185-190; | |
| | | | 1.182; | PKC_PHOSPHO_SITE | |
| | | | 1087-1112, | 148-150; MYRISTYL | |
| | | | 1.178; | 424-429; | |
| | | | 399-418, | PKC_PHOSPHO_SITE | |
| | | | 1.094; | 290-292; MYRISTYL | |
| | | | 518-541, | 409-414; MYRISTYL | |
| | | | 1.202; | 1201-1206; | |
| | | | 1077-1084, | CK2_PHOSPHO_SITE | |
| | | | 1.107; | 380-383; MYRISTYL | |
| | | | 904-924, | 289-294; | |
| | | | 1.148; | PKC_PHOSPHO_SITE | |
| | | | 1140-1151, | 648-650; MYRISTYL | |
| | | | 1.157; | 1193-1198; | |
| | | | 4-14, 1.119; | | |
| | | | 172-192, | | |
| | | | 1.155; | | |
| | | | 351-364, | | |
| | | | 1.107; | | |
| | | | 112-129, | | |
| | | | 1.112; | | |
| | | | 61-69, 1.099; | | |
| | | | 682-691, | | |
| | | | 1.143; | | |
| | | | 828-834, | | |
| | | | 1.101; | | |
| DEX0477_016.aa.2 | Y | 2 - o1-772; | 350-359, | CK2_PHOSPHO_SITE | FU 677-726; |
| | | tm773-795; | 1.098; | 1242-1245; | TYRKINASE 1023-1045; |
| | | i796-891; | 178-184, | CK2_PHOSPHO_SITE | Furin-like |
| | | tm892-914; | 1.127; | 1118-1121; | 189-343; TYRKINASE |
| | | o915-1375; | 1116-1123, | PKC_PHOSPHO_SITE | 955-973; |
| | | | 1.083; | 1171-1173; | Recep_L_domain 366-496; |
| | | | 43-59, 1.178; | CK2_PHOSPHO_SITE | FU 189-230; |
| | | | 249-274, | 182-185; | TYRKINASE 918-931; |
| | | | 1.226; | PKC_PHOSPHO_SITE | PROTEIN_KINASE_TYR |
| | | | 139-148, 1.08; | 186-188; | 961-973; FU 625-672; |
| | | | 1137-1156, | CK2_PHOSPHO_SITE | YLP 1140-1148; |
| | | | 1.109; | 457-460; | PROTEIN_KINASE_ATP |
| | | | 1192-1198, | CAMP_PHOSPHO_SITE | 846-873; |
| | | | 1.056; | 1017-1020; | PROTEIN_KINASE_DOM |
| | | | 109-119, | MYRISTYL 1211-1216; | 840-1107; pkinase |
| | | | 1.148; | MYRISTYL | 840-1097; CYS_RICH |
| | | | 1062-1082, | 327-332; | 192-268; EF_HAND |
| | | | 1.148; | CK2_PHOSPHO_SITE | 1131-1143; YLP |
| | | | 956-966, | 208-211; MYRISTYL | 1313-1321; FU 232-275; |
| | | | 1.122; | 223-228; MYRISTYL | PRO_RICH 1222-1354; |
| | | | 742-765, | 131-136; | TyrKc 840-1096; |
| | | | 1.169; | ASN_GLYCOSYLATION | S_TKc 840-1097; |
| | | | 1090-1096, | 691-694; | TYRKINASE |
| | | | 1.067; | PKC_PHOSPHO_SITE | 1067-1089; |
| | | | 1275-1282, | 1271-1273; | sp_P04626_ERB2_HUMAN |
| | | | 1.063; | CK2_PHOSPHO_SITE | 844-1103; |
| | | | 210-230, | 1127-1130; | Recep_L_domain 52-184; |
| | | | 1.155; | MYRISTYL 508-513; | TYRKINASE |
| | | | 389-402, | ASN_GLYCOSYLATION | 1004-1014; |
| | | | 1.107; | 187-190; MYRISTYL | |
| | | | 657-674, | 1182-1187; | |
| | | | 1.166; | MYRISTYL 692-697; | |
| | | | 190-199, | PKC_PHOSPHO_SITE | |
| | | | 1.162; | 328-330; MYRISTYL | |
| | | | 1324-1335, | 1213-1218; | |
| | | | 1.074; | MYRISTYL 907-912; | |
| | | | 406-434, | PKC_PHOSPHO_SITE | |
| | | | 1.131; | 880-882; MYRISTYL | |
| | | | 939-949, | 824-829; | |
| | | | 1.074; | CK2_PHOSPHO_SITE | |
| | | | 676-699, | 542-545; | |
| | | | 1.202; | PKC_PHOSPHO_SITE | |
| | | | 645-655, | 1356-1358; | |
| | | | 1.157; | ASN_GLYCOSYLATION | |
| | | | 986-992, | 259-262; | |
| | | | 1.101; | PKC_PHOSPHO_SITE | |
| | | | 768-797, | 806-808; MYRISTYL | |
| | | | 1.293; | 849-854; | |
| | | | 1104-1111, | CK2_PHOSPHO_SITE | |
| | | | 1.137; | 1186-1189; | |
| | | | 463-484, | CK2_PHOSPHO_SITE | |
| | | | 1.219; | 144-147; MYRISTYL | |
| | | | 840-849, | 10-15; | |
| | | | 1.143; | PKC_PHOSPHO_SITE | |
| | | | 490-497, | 457-459; | |
| | | | 1.122; | ASN_GLYCOSYLATION | |
| | | | 507-525, | 650-653; | |
| | | | 1.248; | CK2_PHOSPHO_SITE | |
| | | | 364-380, 1.09; | 418-421; MYRISTYL | |
| | | | 531-555, | 462-467; MYRISTYL | |
| | | | 1.187; | 1359-1364; | |
| | | | 437-456, | CK2_PHOSPHO_SITE | |
| | | | 1.094; | 954-957; MYRISTYL | |
| | | | 813-822, 1.11; | 19-24; MYRISTYL | |
| | | | 601-643, | 1351-1356; | |
| | | | 1.215; | ASN_GLYCOSYLATION | |
| | | | 1235-1242, | 68-71; | |
| | | | 1.107; | CK2_PHOSPHO_SITE | |
| | | | 968-984, | 27-30; | |
| | | | 1.114; 4-28, | CK2_PHOSPHO_SITE | |
| | | | 1.197; | 1031-1034; | |
| | | | 1216-1232, | TYR_PHOSPHO_SITE | |
| | | | 1.086; | 885-892; | |
| | | | 701-735, | CK2_PHOSPHO_SITE | |
| | | | 1.229; | 41-44; | |
| | | | 560-596, | CK2_PHOSPHO_SITE | |
| | | | 1.119; | 753-756; MYRISTYL | |
| | | | 331-345, | 1176-1181; | |
| | | | 1.196; | CAMP_PHOSPHO_SITE | |
| | | | 1001-1008, | 803-806; | |
| | | | 1.045; | CK2_PHOSPHO_SITE | |
| | | | 1245-1270, | 402-405; | |
| | | | 1.178; | ASN_GLYCOSYLATION | |
| | | | 292-321, 1.24; | 124-127; | |
| | | | 851-858, | CK2_PHOSPHO_SITE | |
| | | | 1.078; | 533-536; | |
| | | | 1298-1309, | ASN_GLYCOSYLATION | |
| | | | 1.157; | 749-752; MYRISTYL | |
| | | | 150-167, | 788-793; | |
| | | | 1.112; | CK2_PHOSPHO_SITE | |
| | | | 889-930, | 1271-1274; | |
| | | | 1.172; | CK2_PHOSPHO_SITE | |
| | | | 61-105, 1.174; | 323-326; MYRISTYL | |
| | | | 33-41, 1.082; | 447-452; | |
| | | | 866-875, | | |
| | | | 1.175; | | |
| | | | 1022-1035, | | |
| | | | 1.088; | | |
| | | | 1161-1167, | | |
| | | | 1.065; | | |
| | | | 232-247, | | |
| | | | 1.182; | | |
| DEX0477_016.aa.3 | Y | 0 - o1-575; | 507-525, | CK2_PHOSPHO_SITE | Furin-like 189-343; |
| | | | 1.248; | 41-44; | Recep_L_domain 52-184; |
| | | | 33-41, 1.082; | ASN_GLYCOSYLATION | CYS_RICH 192-268; |
| | | | 350-359, | 259-262; | Recep_L_domain |
| | | | 1.098; | PKC_PHOSPHO_SITE | 366-496; |
| | | | 61-105, 1.174; | 328-330; | |
| | | | 364-380, 1.09; | CK2_PHOSPHO_SITE | |
| | | | 109-119, | 533-536; | |
| | | | 1.148; | PKC_PHOSPHO_SITE | |
| | | | 437-456, | 186-188; | |
| | | | 1.094; | CK2_PHOSPHO_SITE | |
| | | | 331-345, | 457-460; | |
| | | | 1.196; | PKC_PHOSPHO_SITE | |
| | | | 139-148, 1.08; | 457-459; | |
| | | | 178-184, | CK2_PHOSPHO_SITE | |
| | | | 1.127; | 542-545; | |
| | | | 43-59, 1.178; | CK2_PHOSPHO_SITE | |
| | | | 463-484, | 418-421; | |
| | | | 1.219; | CK2_PHOSPHO_SITE | |
| | | | 406-434, | 144-147; | |
| | | | 1.331; | CK2_PHOSPHO_SITE | |
| | | | 389-402, | 182-185; MYRISTYL | |
| | | | 1.107; | 223-228; | |
| | | | 292-321, 1.24; | CK2_PHOSPHO_SITE | |
| | | | 150-167, | 323-326; MYRISTYL | |
| | | | 1.112; | 327-332; | |
| | | | 249-274, | ASN_GLYCOSYLATION | |
| | | | 1.226; | 68-71; | |
| | | | 210-230, | CK2_PHOSPHO_SITE | |
| | | | 1.155; | 208-211; MYRISTYL | |
| | | | 232-247, | 447-452; MYRISTYL | |
| | | | 1.182; | 131-136; | |
| | | | 190-199, | ASN_GLYCOSYLATION | |
| | | | 1.162; 4-28, | 187-190; MYRISTYL | |
| | | | 1.197; | 508-513; | |
| | | | 490-497, | ASN_GLYCOSYLATION | |
| | | | 1.122; | 124-127; MYRISTYL | |
| | | | 560-572, | 10-15; | |
| | | | 1.165; | CK2_PHOSPHO_SITE | |
| | | | 531-555, | 27-30; MYRISTYL | |
| | | | 1.187; | 462-467; MYRISTYL | |
| | | | | 19-24; | |
| | | | | CK2_PHOSPHO_SITE | |
| | | | | 402-405; | |
| DEX0477_016.orf.2 | N | 2 - o1-212; | 715-722, | MYRISTYL 791-796; | PROTEIN_KINASE_ATP |
| | | tm213-235; | 1.063; | CK2_PHOSPHO_SITE | 286-313; EF_HAND |
| | | i236-331; | 141-175, | 13-16; | 571-583; TYRKINASE |
| | | tm332-354; | 1.229; | PKC_PHOSPHO_SITE | 444-454; TYRKINASE |
| | | o355-815; | 329-370, | 246-248; | 463-485; TyrKc 280-536; |
| | | | 1.172; | TYR_PHOSPHO_SITE | TYRKINASE 395-413; |
| | | | 291-298, | 325-332; | S_TKc 280-537; |
| | | | 1.078; | PKC_PHOSPHO_SITE | sp_P04626_ERB2_HUMAN |
| | | | 675-682, | 320-322; MYRISTYL | 284-543; |
| | | | 1.107; | 622-627; | PROTEIN_KINASE_TYR |
| | | | 280-289, | CK2_PHOSPHO_SITE | 401-413; YLP 580-588; |
| | | | 1.143; | 626-629; MYRISTYL | YLP 753-761; |
| | | | 738-749, | 289-294; | TYRKINASE 358-371; |
| | | | 1.157; | CK2_PHOSPHO_SITE | pkinase 280-537; FU |
| | | | 764-775, | 567-570; | 117-166; TYRKINASE |
| | | | 1.074; | PKC_PHOSPHO_SITE | 507-529; PRO_RICH |
| | | | 396-406, | 796-798; | 662-794; FU 65-112; |
| | | | 1.122; | CK2_PHOSPHO_SITE | PROTEIN_KINASE_DOM |
| | | | 306-315, | 558-561; MYRISTYL | 280-547; |
| | | | 1.175; | 616-621; | |
| | | | 97-114, 1.166; | CK2_PHOSPHO_SITE | |
| | | | 556-563, | 394-397; MYRISTYL | |
| | | | 1.083; | 651-656; | |
| | | | 544-551, | ASN_GLYCOSYLATION | |
| | | | 1.137; | 131-134; MYRISTYL | |
| | | | 253-262, 1.11; | 799-804; | |
| | | | 426-432, | ASN_GLYCOSYLATION | |
| | | | 1.101; | 90-93; | |
| | | | 379-389, | CK2_PHOSPHO_SITE | |
| | | | 1.074; | 193-196; MYRISTYL | |
| | | | 116-139, | 228-233; | |
| | | | 1.202; | CK2_PHOSPHO_SITE | |
| | | | 41-83, 1.215; | 711-714; MYRISTYL | |
| | | | 632-638, | 653-658; | |
| | | | 1.056; | CK2_PHOSPHO_SITE | |
| | | | 502-522, | 471-474; | |
| | | | 1.148; | ASN_GLYCOSYLATION | |
| | | | 577-596, | 189-192; | |
| | | | 1.109; | PKC_PHOSPHO_SITE | |
| | | | 208-237, | 611-613; MYRISTYL | |
| | | | 1.293; | 132-137; | |
| | | | 182-205, | PKC_PHOSPHO_SITE | |
| | | | 1.169; | 711-713; | |
| | | | 530-536, | CAMP_PHOSPHO_SITE | |
| | | | 1.067; | 457-460; MYRISTYL | |
| | | | 408-424, | 347-352; MYRISTYL | |
| | | | 1.114; | 264-269; | |
| | | | 85-95, 1.157; | CK2_PHOSPHO_SITE | |
| | | | 601-607, | 682-685; | |
| | | | 1.065; 4-36, | CAMP_PHOSPHO_SITE | |
| | | | 1.145; | 243-246; | |
| | | | 441-448, | | |
| | | | 1.045; | | |
| | | | 462-475, | | |
| | | | 1.088; | | |
| | | | 685-710, | | |
| | | | 1.178; | | |
| | | | 656-672, | | |
| | | | 1.086; | | |
| DEX0477_016.aa.4 | N | 0 - o1-164; | 113-124, | CK2_PHOSPHO_SITE | PRICHEXTENSN 143-164; |
| | | | 1.074; 5-21, | 31-34; MYRISTYL | PRO_RICH 15-143; |
| | | | 1.107; 24-31, | 140-145; | PRICHEXTENSN |
| | | | 1.107; 87-98, | PKC_PHOSPHO_SITE | 25-41; PRICHEXTENSN |
| | | | 1.157; 34-59, | 145-147; MYRISTYL | 56-68; PRICHEXTENSN |
| | | | 1.178; 64-71, | 148-153; | 103-119; |
| | | | 1.063; | PKC_PHOSPHO_SITE | |
| | | | | 60-62; | |
| | | | | CK2_PHOSPHO_SITE | |
| | | | | 60-63; MYRISTYL | |
| | | | | 3-8; | |
| DEX0477_016.orf.4 | N | 0 - o1-162; | 4-19, 1.167; | MYRISTYL 138-143; | PRICHEXTENSN 54-66; |
| | | | 62-69, 1.063; | CK2_PHOSPHO_SITE | PRO_RICH 13-141; |
| | | | 85-96, 1.157; | 58-61; | PRICHEXTENSN 23-39; |
| | | | 22-29, 1.107; | CK2_PHOSPHO_SITE | PRICHEXTENSN 101-117; |
| | | | 111-122, | 29-32; MYRISTYL | PRICHEXTENSN |
| | | | 1.074; | 146-151; | 141-162; |
| | | | 32-57, 1.178; | PKC_PHOSPHO_SITE | |
| | | | | 58-60; | |
| | | | | PKC_PHOSPHO_SITE | |
| | | | | 143-145; | |
| DEX0477_016.aa.5 | N | 0 - o1-75; | 34-39, 1.026; | MICROBODIES_CTER | |
| | | | 65-71, 1.076; | 73-75; | |
| | | | 4-25, 1.145; | PKC_PHOSPHO_SITE | |
| | | | | 16-18; | |
| | | | | PKC_PHOSPHO_SITE | |
| | | | | 51-53; MYRISTYL | |
| | | | | 50-55; | |
| DEX0477_016.orf.5 | N | 0 - o1-100; | 9-15, 1.107; | MYRISTYL 26-31; | |
| | | | 76-97, 1.112; | ASN_GLYCOSYLATION | |
| | | | 60-67, 1.106; | 71-74; | |
| | | | 26-45, 1.148; | CK2_PHOSPHO_SITE | |
| | | | | 53-56; MYRISTYL | |
| | | | | 75-80; | |
| DEX0477_017.aa.1 | Y | 0 - o1-678; | 622-645, | MYRISTYL 669-674; | FU 189-230; Furin- |
| | | | 1.169; | CK2_PHOSPHO_SITE | like 189-343; |
| | | | 389-402, | 208-211; | Recep_L_domain 366-496; |
| | | | 1.107; | PKC_PHOSPHO_SITE | CYS_RICH 192-268; |
| | | | 406-434, | 457-459; MYRISTYL | FU 557-606; FU |
| | | | 1.131; | 447-452; | 232-275; FU 501-552; |
| | | | 653-666, | CK2_PHOSPHO_SITE | Recep_L_domain |
| | | | 1.166; | 27-30; | 52-184; |
| | | | 490-497, | ASN_GLYCOSYLATION | |
| | | | 1.122; | 68-71; MYRISTYL | |
| | | | 502-523, | 19-24; MYRISTYL | |
| | | | 1.215; | 223-228; | |
| | | | 33-41, 1.082; | ASN_GLYCOSYLATION | |
| | | | 525-535, | 259-262; | |
| | | | 1.157; | CK2_PHOSPHO_SITE | |
| | | | 210-230, | 457-460; MYRISTYL | |
| | | | 1.155; | 327-332; | |
| | | | 232-247, | CK2_PHOSPHO_SITE | |
| | | | 1.182; | 182-185; | |
| | | | 437-456, | ASN_GLYCOSYLATION | |
| | | | 1.094; | 629-632; | |
| | | | 331-345, | PKC_PHOSPHO_SITE | |
| | | | 1.196; | 328-330; | |
| | | | 139-148, 1.08; | ASN_GLYCOSYLATION | |
| | | | 463-484, | 571-574; MYRISTYL | |
| | | | 1.219; | 572-577; | |
| | | | 581-615, | ASN_GLYCOSYLATION | |
| | | | 1.229; | 124-127; | |
| | | | 364-380, 1.09; | CK2_PHOSPHO_SITE | |
| | | | 669-675, | 418-421; | |
| | | | 1.114; | ASN_GLYCOSYLATION | |
| | | | 249-274, | 530-533; | |
| | | | 1.226; | PKC_PHOSPHO_SITE | |
| | | | 150-167, | 186-188; MYRISTYL | |
| | | | 1.112; | 10-15; | |
| | | | 178-184, | CK2_PHOSPHO_SITE | |
| | | | 1.127; 4-28, | 633-636; | |
| | | | 1.197; | CK2_PHOSPHO_SITE | |
| | | | 350-359, | 144-147; MYRISTYL | |
| | | | 1.098; | 131-136; | |
| | | | 109-119, | ASN_GLYCOSYLATION | |
| | | | 1.148; | 187-190; MYRISTYL | |
| | | | 43-59, 1.178; | 462-467; | |
| | | | 537-554, | CK2_PHOSPHO_SITE | |
| | | | 1.166; | 41-44; | |
| | | | 190-199, | CK2_PHOSPHO_SITE | |
| | | | 1.162; | 402-405; | |
| | | | 61-105, 1.174; | CK2_PHOSPHO_SITE | |
| | | | 556-579, | 323-326; | |
| | | | 1.202; | | |
| | | | 292-321, 1.24; | | |
| DEX0477_018.aa.1 | N | 1 - i1-161; | 67-80, 1.124; | ASN_GLYCOSYLATION | EMP24_GP25L 5-194; |
| | | tm162-184; | 86-91, 1.069; | 155-158; MYRISTYL | |
| | | o185-195; | 114-128, | 28-33; MYRISTYL | |
| | | | 1.094; | 49-54; MYRISTYL | |
| | | | 31-36, 1.036; | 59-64; MYRISTYL | |
| | | | 135-141, | 4-9; | |
| | | | 1.075; | CK2_PHOSPHO_SITE | |
| | | | 160-187, | 15-18; AMIDATION | |
| | | | 1.163; | 54-57; MYRISTYL | |
| | | | 93-106, 1.125; | 19-24; | |
| | | | 18-24, 1.066; | CAMP_PHOSPHO_SITE | |
| | | | | 6-9; MYRISTYL 45-50; | |
| DEX0477_018.orf.1 | N | 1 - i1-80; | | ASN_GLYCOSYLATION | |
| | | tm81-103; | | 74-77; MYRISTYL | |
| | | o104-114; | | 15-20; | |
| DEX0477_019.aa.1 | Y | 0 - o1-64; | 51-61, 1.084; | PKC_PHOSPHO_SITE | |
| | | | 27-47, 1.163; | 26-28; MYRISTYL | |
| | | | | 8-13; | |
| DEX0477_019.orf.1 | Y | 0 - o1-325; | 255-268, | MYRISTYL 313-318; | IGc2 137-201; IGc2 |
| | | | 1.146; | ASN_GLYCOSYLATION | 51-107; IG_LIKE_1 |
| | | | 179-184, | 235-238; | 41-118; ig 231-280; |
| | | | 1.081; | ASN_GLYCOSYLATION | IGc2 229-285; IG |
| | | | 161-172, | 203-206; | 223-300; ACTININ_1 |
| | | | 1.128; | CK2_PHOSPHO_SITE | 151-160; ig 53-102; |
| | | | 190-200, | 22-25; MYRISTYL | IG 131-213; |
| | | | 1.152; | 305-310; MYRISTYL | IG_LIKE_2 216-298; |
| | | | 291-300, | 309-314; | ig 139-196; |
| | | | 1.132; | PKC_PHOSPHO_SITE | IG_LIKE_3 124-211; |
| | | | 114-127, | 249-251; | IG 45-117; |
| | | | 1.097; | ASN_GLYCOSYLATION | |
| | | | 276-283, | 152-155; | |
| | | | 1.147; | PKC_PHOSPHO_SITE | |
| | | | 138-149, | 167-169; MYRISTYL | |
| | | | 1.113; | 317-322; MYRISTYL | |
| | | | 16-36, 1.212; | 274-279; MYRISTYL | |
| | | | 207-249, | 96-101; MYRISTYL | |
| | | | 1.172; | 301-306; | |
| | | | 81-88, 1.053; | ASN_GLYCOSYLATION | |
| | | | 43-73, 1.158; | 131-134; | |
| | | | 305-322, | ASN_GLYCOSYLATION | |
| | | | 1.227; | 176-179; | |
| | | | | ASN_GLYCOSYLATION | |
| | | | | 89-92; | |
| | | | | CK2_PHOSPHO_SITE | |
| | | | | 185-188; | |
| | | | | ASN_GLYCOSYLATION | |
| | | | | 103-106; MYRISTYL | |
| | | | | 53-58; | |
| | | | | ASN_GLYCOSYLATION | |
| | | | | 183-186; | |
| | | | | ASN_GLYCOSYLATION | |
| | | | | 273-276; | |
| | | | | PKC_PHOSPHO_SITE | |
| | | | | 113-115; | |
| | | | | PKC_PHOSPHO_SITE | |
| | | | | 285-287; | |
| | | | | PKC_PHOSPHO_SITE | |
| | | | | 91-93; MYRISTYL | |
| | | | | 195-200; | |
| | | | | ASN_GLYCOSYLATION | |
| | | | | 55-58; | |
| | | | | CK2_PHOSPHO_SITE | |
| | | | | 222-225; MYRISTYL | |
| | | | | 231-236; | |
| | | | | ASN_GLYCOSYLATION | |
| | | | | 288-291; | |
| DEX0477_020.aa.1 | Y | 0 - o1-702; | 567-577, | ASN_GLYCOSYLATION | IGc2 514-578; IGc2 |
| | | | 1.152; | 360-363; | 606-662; IG 508-590; |
| | | | 682-699, | ASN_GLYCOSYLATION | IG 40-141; |
| | | | 1.227; | 152-155; | IG_LIKE_3 418-495; |
| | | | 420-450, | PKC_PHOSPHO_SITE | ACTININ_1 172-181; |
| | | | 1.158; | 248-250; | IG 422-494; |
| | | | 48-66, 1.21; | ASN_GLYCOSYLATION | ACTININ_1 350-359; |
| | | | 281-289, | 330-333; MYRISTYL | IG 244-319; IG 330-412; |
| | | | 1.075; | 686-691; | IG 152-234; ig |
| | | | 200-205, | ASN_GLYCOSYLATION | 516-573; ACTININ_1 |
| | | | 1.081; | 197-200; MYRISTYL | 528-537; ig 430-479; |
| | | | 556-561, | 85-90; | IGc2 158-222; |
| | | | 1.081; | PKC_PHOSPHO_SITE | ig 252-301; |
| | | | 584-626, | 490-492; | IG_LIKE_5 593-675; |
| | | | 1.172; | CK2_PHOSPHO_SITE | IG_LIKE_6 501-588; |
| | | | 296-302, | 384-387; | ig 338-395; |
| | | | 1.097; | ASN_GLYCOSYLATION | IG_LIKE_4 323-421; |
| | | | 33-39, 1.027; | 553-556; | IG_LIKE_1 240-315; |
| | | | 174-179, | PKC_PHOSPHO_SITE | IGc2 336-400; IG |
| | | | 1.079; | 366-368; | 600-677; ig 608-657; |
| | | | 226-238, | ASN_GLYCOSYLATION | IG_LIKE_2 145-232; |
| | | | 1.194; | 665-668; | ig 160-217; |
| | | | 119-129, 1.15; | ASN_GLYCOSYLATION | IGc2 428-484; IGc2 |
| | | | 458-465, | 115-118; | 250-306; |
| | | | 1.053; | CK2_PHOSPHO_SITE | |
| | | | 378-386, | 599-602; | |
| | | | 1.138; 5-28, | PKC_PHOSPHO_SITE | |
| | | | 1.141; | 33-35; MYRISTYL | |
| | | | 632-645, | 295-300; MYRISTYL | |
| | | | 1.146; | 678-683; | |
| | | | 240-247, | ASN_GLYCOSYLATION | |
| | | | 1.074; | 309-312; MYRISTYL | |
| | | | 340-348, | 651-656; | |
| | | | 1.135; | ASN_GLYCOSYLATION | |
| | | | 218-224, | 204-207; | |
| | | | 1.059; | ASN_GLYCOSYLATION | |
| | | | 313-326, | 580-583; | |
| | | | 1.115; | ASN_GLYCOSYLATION | |
| | | | 360-371, | 351-354; | |
| | | | 1.128; | ASN_GLYCOSYLATION | |
| | | | 538-549, | 560-563; | |
| | | | 1.128; | ASN_GLYCOSYLATION | |
| | | | 98-112, 1.107; | 104-107; MYRISTYL | |
| | | | 79-86, 1.127; | 694-699; | |
| | | | 159-169, | ASN_GLYCOSYLATION | |
| | | | 1.113; | 375-378; | |
| | | | 668-677, | ASN_GLYCOSYLATION | |
| | | | 1.132; | 208-211; | |
| | | | 256-272, | ASN_GLYCOSYLATION | |
| | | | 1.131; | 508-511; | |
| | | | 515-526, | ASN_GLYCOSYLATION | |
| | | | 1.113; | 274-277; | |
| | | | 398-415, | ASN_GLYCOSYLATION | |
| | | | 1.194; | 480-483; | |
| | | | 653-660, | ASN_GLYCOSYLATION | |
| | | | 1.147; | 288-291; MYRISTYL | |
| | | | 491-504, | 690-695; MYRISTYL | |
| | | | 1.097; | 682-687; | |
| | | | 137-148, 1.1; | ASN_GLYCOSYLATION | |
| | | | 182-193, | 466-469; | |
| | | | 1.128; | CK2_PHOSPHO_SITE | |
| | | | | 96-99; | |
| | | | | PKC_PHOSPHO_SITE | |
| | | | | 662-664; MYRISTYL | |
| | | | | 572-577; | |
| | | | | ASN_GLYCOSYLATION | |
| | | | | 256-259; MYRISTYL | |
| | | | | 473-478; | |
| | | | | ASN_GLYCOSYLATION | |
| | | | | 292-295; | |
| | | | | ASN_GLYCOSYLATION | |
| | | | | 432-435; MYRISTYL | |
| | | | | 430-435; MYRISTYL | |
| | | | | 608-613; | |
| | | | | PKC_PHOSPHO_SITE | |
| | | | | 222-224; | |
| | | | | ASN_GLYCOSYLATION | |
| | | | | 650-653; | |
| | | | | ASN_GLYCOSYLATION | |
| | | | | 246-249; | |
| | | | | PKC_PHOSPHO_SITE | |
| | | | | 626-628; MYRISTYL | |
| | | | | 307-312; | |
| | | | | ASN_GLYCOSYLATION | |
| | | | | 529-532; | |
| | | | | CK2_PHOSPHO_SITE | |
| | | | | 206-209; | |
| | | | | PKC_PHOSPHO_SITE | |
| | | | | 212-214; | |
| | | | | ASN_GLYCOSYLATION | |
| | | | | 612-615; | |
| | | | | ASN_GLYCOSYLATION | |
| | | | | 182-185; | |
| | | | | PKC_PHOSPHO_SITE | |
| | | | | 468-470; | |
| | | | | PKC_PHOSPHO_SITE | |
| | | | | 188-190; | |
| | | | | CK2_PHOSPHO_SITE | |
| | | | | 562-565; | |
| | | | | PKC_PHOSPHO_SITE | |
| | | | | 544-546; | |
| | | | | PKC_PHOSPHO_SITE | |
| | | | | 96-98; | |
| | | | | CK2_PHOSPHO_SITE | |
| | | | | 280-283; | |
| DEX0477_020.aa.2 | Y | 0 - o1-726; | 668-699, | ASN_GLYCOSYLATION | IG 508-590; ig 516-573; |
| | | | 1.132; | 580-583; MYRISTYL | IG 600-677; |
| | | | 48-66, 1.21; | 572-577; | IGc2 158-222; |
| | | | 538-549, | ASN_GLYCOSYLATION | IG_LIKE_1 240-315; |
| | | | 1.128; | 288-291; | ig 608-657; IG 422-494; |
| | | | 515-526, | PKC_PHOSPHO_SITE | ACTININ_1 172-181; |
| | | | 1.113; | 490-492; MYRISTYL | IG_LIKE_2 145-232; |
| | | | 119-129, 1.15; | 608-613; | ACTININ_1 528-537; |
| | | | 296-302, | ASN_GLYCOSYLATION | IGc2 250-306; |
| | | | 1.097; | 480-483; | ACTININ_1 350-359; |
| | | | 240-247, | PKC_PHOSPHO_SITE | IG_LIKE_6 501-588; |
| | | | 1.074; 5-28, | 212-214; MYRISTYL | ig 430-479; |
| | | | 1.141; 33-39, | 651-656; | IG_LIKE_4 323-421; |
| | | | 1.027; | CK2_PHOSPHO_SITE | ig 252-301; ig 338-395; |
| | | | 281-289, | 384-387; | IG 40-141; |
| | | | 1.075; | ASN_GLYCOSYLATION | IG_LIKE_3 418-495; |
| | | | 491-504, | 612-615; | IGc2 606-662; IG |
| | | | 1.097; | PKC_PHOSPHO_SITE | 244-319; IG 330-412; |
| | | | 200-205, | 366-368; | ig 160-217; |
| | | | 1.081; | CK2_PHOSPHO_SITE | IGc2 428-484; IGc2 |
| | | | 137-148, 1.1; | 206-209; | 514-578; IG 152-234; |
| | | | 98-112, 1.107; | ASN_GLYCOSYLATION | IGc2 336-400; |
| | | | 174-179, | 104-107; | IG_LIKE_5 593-675; |
| | | | 1.079; | PKC_PHOSPHO_SITE | |
| | | | 398-415, | 701-703; | |
| | | | 1.194; | PKC_PHOSPHO_SITE | |
| | | | 218-224, | 188-190; | |
| | | | 1.059; | ASN_GLYCOSYLATION | |
| | | | 313-326, | 204-207; | |
| | | | 1.115; | PKC_PHOSPHO_SITE | |
| | | | 378-386, | 544-546; | |
| | | | 1.138; | ASN_GLYCOSYLATION | |
| | | | 458-465, | 466-469; | |
| | | | 1.053; | ASN_GLYCOSYLATION | |
| | | | 79-86, 1.127; | 553-556; | |
| | | | 159-169, | PKC_PHOSPHO_SITE | |
| | | | 1.113; | 33-35; | |
| | | | 420-450, | ASN_GLYCOSYLATION | |
| | | | 1.158; | 115-118; | |
| | | | 182-193, | PKC_PHOSPHO_SITE | |
| | | | 1.128; | 248-250; | |
| | | | 632-645, | PKC_PHOSPHO_SITE | |
| | | | 1.146; | 222-224; | |
| | | | 360-371, | ASN_GLYCOSYLATION | |
| | | | 1.128; | 560-563; | |
| | | | 584-626, | ASN_GLYCOSYLATION | |
| | | | 1.172; | 360-363; | |
| | | | 340-348, | PKC_PHOSPHO_SITE | |
| | | | 1.135; | 626-628; | |
| | | | 653-660, | PKC_PHOSPHO_SITE | |
| | | | 1.147; | 96-98; | |
| | | | 256-272, | ASN_GLYCOSYLATION | |
| | | | 1.131; | 650-653; | |
| | | | 226-238, | PKC_PHOSPHO_SITE | |
| | | | 1.194; | 662-664; MYRISTYL | |
| | | | 718-723, | 295-300; MYRISTYL | |
| | | | 1.096; | 85-90; | |
| | | | 556-561, | ASN_GLYCOSYLATION | |
| | | | 1.081; | 256-259; | |
| | | | 567-577, | ASN_GLYCOSYLATION | |
| | | | 1.152; | 665-668; | |
| | | | | ASN_GLYCOSYLATION | |
| | | | | 208-211; | |
| | | | | ASN_GLYCOSYLATION | |
| | | | | 351-354; | |
| | | | | PKC_PHOSPHO_SITE | |
| | | | | 468-470; | |
| | | | | ASN_GLYCOSYLATION | |
| | | | | 152-155; | |
| | | | | ASN_GLYCOSYLATION | |
| | | | | 375-378; | |
| | | | | ASN_GLYCOSYLATION | |
| | | | | 274-277; | |
| | | | | CK2_PHOSPHO_SITE | |
| | | | | 599-602; | |
| | | | | ASN_GLYCOSYLATION | |
| | | | | 529-532; | |
| | | | | ASN_GLYCOSYLATION | |
| | | | | 197-200; | |
| | | | | ASN_GLYCOSYLATION | |
| | | | | 292-295; MYRISTYL | |
| | | | | 430-435; | |
| | | | | ASN_GLYCOSYLATION | |
| | | | | 182-185; | |
| | | | | ASN_GLYCOSYLATION | |
| | | | | 508-511; | |
| | | | | PKC_PHOSPHO_SITE | |
| | | | | 682-684; | |
| | | | | CK2_PHOSPHO_SITE | |
| | | | | 673-676; MYRISTYL | |
| | | | | 307-312; | |
| | | | | ASN_GLYCOSYLATION | |
| | | | | 330-333; | |
| | | | | CK2_PHOSPHO_SITE | |
| | | | | 96-99; MYRISTYL | |
| | | | | 473-478; | |
| | | | | CK2_PHOSPHO_SITE | |
| | | | | 562-565; | |
| | | | | ASN_GLYCOSYLATION | |
| | | | | 432-435; | |
| | | | | ASN_GLYCOSYLATION | |
| | | | | 246-249; | |
| | | | | CK2_PHOSPHO_SITE | |
| | | | | 280-283; | |
| | | | | ASN_GLYCOSYLATION | |
| | | | | 309-312; | |
| DEX0477_021.aa.1 | Y | 0 - o1-193; | 77-83, 1.038; | PKC_PHOSPHO_SITE | |
| | | | 174-180, | 160-162; | |
| | | | 1.093; | PKC_PHOSPHO_SITE | |
| | | | 165-171, | 5-7; | |
| | | | 1.088; | CAMP_PHOSPHO_SITE | |
| | | | 89-110, 1.132; | 48-51; | |
| | | | 185-190, | ASN_GLYCOSYLATION | |
| | | | 1.086; | 21-24; | |
| | | | 56-61, 1.069; | PKC_PHOSPHO_SITE | |
| | | | 23-38, 1.189; | 132-134; | |
| | | | 14-21, 1.062; | PKC_PHOSPHO_SITE | |
| | | | 135-158, | 164-166; | |
| | | | 1.124; | PKC_PHOSPHO_SITE | |
| | | | 116-131, | 86-88; | |
| | | | 1.208; | PKC_PHOSPHO_SITE | |
| | | | | 154-156; | |
| | | | | CK2_PHOSPHO_SITE | |
| | | | | 75-78; | |
| | | | | PKC_PHOSPHO_SITE | |
| | | | | 42-44; | |
| DEX0477_021.orf.1 | Y | 0 - o1-199; | 141-164, | PKC_PHOSPHO_SITE | |
| | | | 1.124; 4-18, | 160-162; | |
| | | | 1.227; 25-44, | CAMP_PHOSPHO_SITE | |
| | | | 1.22; 191-196, | 54-57; | |
| | | | 1.086; | PKC_PHOSPHO_SITE | |
| | | | 62-67, 1.069; | 170-172; | |
| | | | 180-186, | CAMP_PHOSPHO_SITE | |
| | | | 1.093; | 16-19; | |
| | | | 83-89, 1.038; | PKC_PHOSPHO_SITE | |
| | | | 171-177, | 138-140; | |
| | | | 1.088; | PKC_PHOSPHO_SITE | |
| | | | 95-116, 1.132; | 92-94; | |
| | | | 122-137, | CK2_PHOSPHO_SITE | |
| | | | 1.208; | 81-84; | |
| | | | | PKC_PHOSPHO_SITE | |
| | | | | 166-168; MYRISTYL | |
| | | | | 8-13; | |
| | | | | PKC_PHOSPHO_SITE | |
| | | | | 48-50; | |
| DEX0477_021.aa.2 | Y | 0 - o1-187; | 129-152, | PKC_PHOSPHO_SITE | |
| | | | 1.124; | 148-150; | |
| | | | 159-165, | CAMP_PHOSPHO_SITE | |
| | | | 1.088; | 42-45; | |
| | | | 168-174, | PKC_PHOSPHO_SITE | |
| | | | 1.093; | 158-160; | |
| | | | 17-32, 1.189; | ASN_GLYCOSYLATION | |
| | | | 71-77, 1.038; | 15-18; | |
| | | | 110-125, | PKC_PHOSPHO_SITE | |
| | | | 1.208; | 126-128; | |
| | | | 179-184, | CK2_PHOSPHO_SITE | |
| | | | 1.086; | 69-72; | |
| | | | 83-104, 1.132; | PKC_PHOSPHO_SITE | |
| | | | 9-15, 1.024; | 80-82; | |
| | | | 50-55, 1.069; | PKC_PHOSPHO_SITE | |
| | | | | 36-38; | |
| | | | | PKC_PHOSPHO_SITE | |
| | | | | 154-156; | |
| DEX0477_021.orf.2 | Y | 0 - o1-186; | 82-103, 1.132; | PKC_PHOSPHO_SITE | |
| | | | 178-183, | 153-155; | |
| | | | 1.086; | PKC_PHOSPHO_SITE | |
| | | | 109-124, | 125-127; | |
| | | | 1.208; | PKC_PHOSPHO_SITE | |
| | | | 49-54, 1.069; | 79-81; | |
| | | | 4-31, 1.22; | CK2_PHOSPHO_SITE | |
| | | | 158-164, | 68-71; | |
| | | | 1.088; | PKC_PHOSPHO_SITE | |
| | | | 167-173, | 35-37; | |
| | | | 1.093; | PKC_PHOSPHO_SITE | |
| | | | 70-76, 1.038; | 147-149; | |
| | | | 128-151, | CAMP_PHOSPHO_SITE | |
| | | | 1.124; | 41-44; | |
| | | | | PKC_PHOSPHO_SITE | |
| | | | | 157-159; | |
| DEX0477_022.aa.1 | N | 0 - o1-136; | | PKC_PHOSPHO_SITE | |
| | | | | 16-18; MYRISTYL | |
| | | | | 41-46; MYRISTYL | |
| | | | | 81-86; | |
| | | | | TYR_PHOSPHO_SITE | |
| | | | | 128-134; | |
| | | | | TYR-PHOSPHO_SITE | |
| | | | | 31-39; | |
| | | | | CK2_PHOSPHO_SITE | |
| | | | | 128-131; | |
| | | | | ASN_GLYCOSYLATION | |
| | | | | 78-81; | |
| DEX0477_022.orf.1 | Y | 0 - o1-92; | | PKC_PHOSPHO_SITE | |
| | | | | 51-53; | |
| | | | | CK2_PHOSPHO_SITE | |
| | | | | 48-51; | |
| | | | | TYR_PHOSPHO_SITE | |
| | | | | 53-60; | |
| | | | | ASN_GLYCOSYLATION | |
| | | | | 46-49; | |
| | | | | CK2_PHOSPHO_SITE | |
| | | | | 29-32; | |
| | | | | PKC_PHOSPHO_SITE | |
| | | | | 20-22; MYRISTYL | |
| | | | | 4-9; | |
| | | | | TYR_PHOSPHO_SITE | |
| | | | | 34-40; | |
| | | | | PKC_PHOSPHO_SITE | |
| | | | | 8-10; MYRISTYL | |
| | | | | 16-21; | |
| | | | | CK2_PHOSPHO_SITE | |
| | | | | 76-79; | |
| | | | | PKC_PHOSPHO_SITE | |
| | | | | 71-73; | |
| DEX0477_023.aa.1 | N | 0 - o1-82; | 4-12, 1.236; | | |
| | | | 51-79, 1.165; | | |
| | | | 17-44, 1.126; | | |
| DEX0477_023.orf.1 | N | 0 - o1-79; | | ASN_GLYCOSYLATION | |
| | | | | 18-21; MYRISTYL | |
| | | | | 4-9; | |
| | | | | ASN_GLYCOSYLATION | |
| | | | | 8-11; MYRISTYL | |
| | | | | 26-31; | |
| | | | | CK2_PHOSPHO_SITE | |
| | | | | 2-5; | |
| | | | | CK2_PHOSPHO_SITE | |
| | | | | 43-46; RGD 5-7; | |
| | | | | PKC_PHOSPHO_SITE | |
| | | | | 10-12; | |
| | | | | CK2_PHOSPHO_SITE | |
| | | | | 29-32; | |
| | | | | ASN_GLYCOSYLATION | |
| | | | | 12-15; | |
| | | | | PKC_PHOSPHO_SITE | |
| | | | | 39-41; | |
| DEX0477_024.aa.1 | Y | 0 - o1-49; | 4-20, 1.22; | PKC_PHOSPHO_SITE | |
| | | | | 24-26; | |
| | | | | CK2_PHOSPHO_SITE | |
| | | | | 40-43; | |
| | | | | CAMP_PHOSPHO_SITE | |
| | | | | 30-33; | |
| DEX0477_024.orf.1 | N | 0 - o1-140; | | TYR_PHOSPHO_SITE | |
| | | | | 95-102; MYRISTYL | |
| | | | | 129-134; | |
| | | | | ASN_GLYCOSYLATION | |
| | | | | 100-103; | |
| | | | | CK2_PHOSPHO_SITE | |
| | | | | 105-108; | |
| | | | | PKC_PHOSPHO_SITE | |
| | | | | 120-122; | |
| | | | | ASN_GLYCOSYLATION | |
| | | | | 136-139; | |
| | | | | MICROBODIES_CTER | |
| | | | | 138-140; | |
| | | | | CK2_PHOSPHO_SITE | |
| | | | | 31-34; | |
| | | | | PKC_PHOSPHO_SITE | |
| | | | | 74-76; | |
| | | | | PKC_PHOSPHO_SITE | |
| | | | | 38-40; MYRISTYL | |
| | | | | 110-115; MYRISTYL | |
| | | | | 133-138; | |
| | | | | CK2_PHOSPHO_SITE | |
| | | | | 63-66; | |
| DEX0477_024.aa.2 | Y | 0 - o1-74; | 26-45, 1.22; | CAMP_PHOSPHO_SITE | |
| | | | | 55-58; | |
| | | | | CK2_PHOSPHO_SITE | |
| | | | | 65-68; | |
| | | | | PKC_PHOSPHO_SITE | |
| | | | | 10-12; | |
| | | | | PKC_PHOSPHO_SITE | |
| | | | | 9-11; | |
| | | | | PKC_PHOSPHO_SITE | |
| | | | | 49-51; | |
| | | | | CAMP_PHOSPHO_SITE | |
| | | | | 11-14; | |
| DEX0477_024.orf.2 | N | 0 - o1-140; | | MYRISTYL 129-134; | |
| | | | | PKC_PHOSPHO_SITE | |
| | | | | 38-40; | |
| | | | | CK2_PHOSPHO_SITE | |
| | | | | 63-66; | |
| | | | | CK2_PHOSPHO_SITE | |
| | | | | 31-34; | |
| | | | | CK2_PHOSPHO_SITE | |
| | | | | 105-108; | |
| | | | | ASN_GLYCOSYLATION | |
| | | | | 136-139; MYRISTYL | |
| | | | | 133-138; | |
| | | | | PKC_PHOSPHO_SITE | |
| | | | | 120-122; | |
| | | | | TYR_PHOSPHO_SITE | |
| | | | | 95-102; | |
| | | | | MICROBODIES_CTER | |
| | | | | 138-140; | |
| | | | | ASN_GLYCOSYLATION | |
| | | | | 100-103; | |
| | | | | PKC_PHOSPHO_SITE | |
| | | | | 74-76; MYRISTYL | |
| | | | | 110-115; | |
| DEX0477_024.aa.3 | Y | 0 - o1-74; | 26-45, 1.22; | CK2_PHOSPHO_SITE | |
| | | | | 65-68; | |
| | | | | CAMP_PHOSPHO_SITE | |
| | | | | 11-14; | |
| | | | | PKC_PHOSPHO_SITE | |
| | | | | 49-51; | |
| | | | | CAMP_PHOSPHO_SITE | |
| | | | | 55-58; | |
| | | | | PKC_PHOSPHO_SITE | |
| | | | | 10-12; | |
| DEX0477_024.orf.3 | N | 0 - o1-140; | | MYRISTYL 133-138; | |
| | | | | CK2_PHOSPHO_SITE | |
| | | | | 105-108; | |
| | | | | ASN_GLYCOSYLATION | |
| | | | | 136-139; | |
| | | | | PKC_PHOSPHO_SITE | |
| | | | | 38-40; MYRISTYL | |
| | | | | 129-134; | |
| | | | | CK2_PHOSPHO_SITE | |
| | | | | 63-66; | |
| | | | | PKC_PHOSPHO_SITE | |
| | | | | 120-122; | |
| | | | | PKC_PHOSPHO_SITE | |
| | | | | 74-76; | |
| | | | | CK2_PHOSPHO_SITE | |
| | | | | 31-34; MYRISTYL | |
| | | | | 110-115; | |
| | | | | MICROBODIES_CTER | |
| | | | | 138-140; | |
| | | | | ASN_GLYCOSYLATION | |
| | | | | 100-103; | |
| | | | | TYR_PHOSPHO_SITE | |
| | | | | 95-102; | |
| DEX0477_024.aa.4 | N | 0 - o1-128; | 90-116, 1.215; | PKC_PHOSPHO_SITE | |
| | | | 46-88, 1.18; | 16-18; | |
| | | | 19-38, 1.132; | ASN_GLYCOSYLATION | |
| | | | 120-125, | 88-91; | |
| | | | 1.064; 4-13, | | |
| | | | 1.197; | | |
| DEX0477_024.orf.4 | N | 0 - o1-84; | | TYR_PHOSPHO_SITE | |
| | | | | 39-46; | |
| | | | | PKC_PHOSPHO_SITE | |
| | | | | 64-66; MYRISTYL | |
| | | | | 73-78; MYRISTYL | |
| | | | | 77-82; | |
| | | | | ASN_GLYCOSYLATION | |
| | | | | 80-83; | |
| | | | | CK2_PHOSPHO_SITE | |
| | | | | 49-52; MYRISTYL | |
| | | | | 54-59; | |
| | | | | MICROBODIES_CTER | |
| | | | | 82-84; | |
| | | | | ASN_GLYCOSYLATION | |
| | | | | 44-47; | |
| | | | | CK2_PHOSPHO_SITE | |
| | | | | 1-4; | |
| | | | | PKC_PHOSPHO_SITE | |
| | | | | 18-20; | |
| DEX0477_025.aa.1 | N | 0 - o1-118; | 109-115, | CK2_PHOSPHO_SITE | |
| | | | 1.127; | 42-45; | |
| | | | 67-75, 1.049; | PKC_PHOSPHO_SITE | |
| | | | 93-100, 1.065; | 66-68; | |
| | | | 84-91, 1.076; | CK2_PHOSPHO_SITE | |
| | | | 28-39, 1.117; | 55-58; | |
| | | | | CK2_PHOSPHO_SITE | |
| | | | | 12-15; | |
| | | | | CK2_PHOSPHO_SITE | |
| | | | | 107-110; | |
| | | | | CK2_PHOSPHO_SITE | |
| | | | | 18-21; MYRISTYL | |
| | | | | 27-32; | |
| DEX0477_025.orf.1 | N | 0 - o1-117; | 83-90, 1.079; | CK2_PHOSPHO_SITE | |
| | | | 66-74, 1.049; | 54-57; | |
| | | | 27-38, 1.117; | PKC_PHOSPHO_SITE | |
| | | | 92-99, 1.065; | 65-67; | |
| | | | 108-114, 1.127; | CK2_PHOSPHO_SITE | |
| | | | | 106-109; | |
| | | | | CK2_PHOSPHO_SITE | |
| | | | | 11-14; MYRISTYL | |
| | | | | 26-31; | |
| | | | | CK2_PHOSPHO_SITE | |
| | | | | 17-20; | |
| | | | | CK2_PHOSPHO_SITE | |
| | | | | 41-44; | |
| DEX0477_026.aa.1 | N | 0 - o1-75; | 32-57, 1.102; | MYRISTYL 25-30; | |
| | | | 60-65, 1.05; | MYRISTYL 42-47; | |
| | | | 4-25, 1.133; | | |
| DEX0477_026.orf.1 | N | 0 - o1-143; | 5-21, 1.145; | MYRISTYL 85-90; | |
| | | | 105-113, | CK2_PHOSPHO_SITE | |
| | | | 1.133; | 13-16; | |
| | | | 65-84, 1.128; | CK2_PHOSPHO_SITE | |
| | | | 120-140, | 87-90; MYRISTYL | |
| | | | 1.185; | 82-87; | |
| | | | | PKC_PHOSPHO_SITE | |
| | | | | 101-103; MYRISTYL | |
| | | | | 47-52; MYRISTYL | |
| | | | | 57-62; | |
| | | | | PKC_PHOSPHO_SITE | |
| | | | | 112-114; | |
| DEX0477_027.aa.1 | N | 0 - o1-113; | 83-96, 1.112; | PKC_PHOSPHO_SITE | |
| | | | 66-74, 1.096; | 61-63; | |
| | | | 35-59, 1.135; | CK2_PHOSPHO_SITE | |
| | | | 15-23, 1.103; | 94-97; MYRISTYL | |
| | | | | 91-96; MYRISTYL | |
| | | | | 14-19; | |
| | | | | PKC_PHOSPHO_SITE | |
| | | | | 70-72; | |
| | | | | PKC_PHOSPHO_SITE | |
| | | | | 34-36; MYRISTYL | |
| | | | | 85-90; | |
| | | | | TYR_PHOSPHO_SITE | |
| | | | | 106-113; | |
| | | | | PKC_PHOSPHO_SITE | |
| | | | | 39-41; | |
| DEX0477_027.aa.2 | N | 0 - o1-210; | 76-87, 1.108; | PKC_PHOSPHO_SITE | Rhodanese 103-208; |
| | | | 93-116, 1.107; | 44-46; | RHOD 102-209; |
| | | | 54-61, 1.141; | CK2_PHOSPHO_SITE | RHODANESE_3 112-210; |
| | | | 153-162, | 103-106; | |
| | | | 1.101; | CK2_PHOSPHO_SITE | |
| | | | 14-34, 1.189; | 123-126; MYRISTYL | |
| | | | 182-190, | 180-185; MYRISTYL | |
| | | | 1.081; | 130-135; | |
| | | | 41-52, 1.17; | AMIDATION 176-179; | |
| | | | 167-176, | MYRISTYL 18-23; | |
| | | | 1.192; | CK2_PHOSPHO_SITE | |
| | | | 130-146, 1.1; | 51-54; | |
| | | | | PKC_PHOSPHO_SITE | |
| | | | | 8-10; | |
| | | | | CK2_PHOSPHO_SITE | |
| | | | | 141-144; | |
| | | | | PKC_PHOSPHO_SITE | |
| | | | | 113-115; | |
| DEX0477_027.orf.2 | Y | 0 - o1-173; | 56-79, 1.107; | MYRISTYL 143-148; | RHOD 65-172; |
| | | | 145-153, | PKC_PHOSPHO_SITE | RHODANESE_3 75-173; |
| | | | 1.081; | 76-78; | Rhodanese 66-171; |
| | | | 39-50, 1.108; | CK2_PHOSPHO_SITE | |
| | | | 4-14, 1.08; | 66-69; AMIDATION | |
| | | | 16-23, 1.146; | 139-142; | |
| | | | 116-125, | PKC_PHOSPHO_SITE | |
| | | | 1.101; | 3-5; | |
| | | | 130-139, | CK2_PHOSPHO_SITE | |
| | | | 1.192; | 86-89; | |
| | | | 93-109, 1.1; | CK2_PHOSPHO_SITE | |
| | | | | 104-107; MYRISTYL | |
| | | | | 93-98; | |
| DEX0477_027.aa.3 | N | 0 - o1-189; | 146-155, | PKC_PHOSPHO_SITE | RHODANESE_3 91-189; |
| | | | 1.192; | 8-10; MYRISTYL | RHOD 81-188; |
| | | | 132-141, | 18-23; | Rhodanese 82-187; |
| | | | 1.101; | PKC_PHOSPHO_SITE | |
| | | | 76-87, 1.108; | 44-46; MYRISTYL | |
| | | | 54-61, 1.141; | 159-164; MYRISTYL | |
| | | | 109-125, 1.1; | 91-96; | |
| | | | 41-52, 1.17; | CK2_PHOSPHO_SITE | |
| | | | 161-169, | 120-123; | |
| | | | 1.081; | CK2_PHOSPHO_SITE | |
| | | | 14-34, 1.189; | 102-105; MYRISTYL | |
| | | | | 109-114; | |
| | | | | AMIDATION 155-158; | |
| | | | | CK2_PHOSPHO_SITE | |
| | | | | 51-54; | |
| DEX0477_027.orf.3 | Y | 0 - o1-152; | | PKC_PHOSPHO_SITE | Rhodanese 45-150; |
| | | | | 3-5; MYRISTYL 54-59; | RHODANESE_3 54-152; |
| | | | | MYRISTYL 122-127; | RHOD 44-151; |
| | | | | CK2_PHOSPHO_SITE | |
| | | | | 65-68; | |
| | | | | CK2_PHOSPHO_SITE | |
| | | | | 83-86; MYRISTYL | |
| | | | | 72-77; AMIDATION | |
| | | | | 118-121; | |
| DEX0477_027.aa.4 | N | 0 - o1-105; | 48-57, 1.101; | MYRISTYL 25-30; | RHODANESE_3 7-105; |
| | | | 62-71, 1.192; | AMIDATION 71-74; | Rhodanese 1-103; |
| | | | 77-85, 1.081; | MYRISTYL 75-80; | RHOD 2-104; |
| | | | 25-41, 1.1; | CK2_PHOSPHO_SITE | |
| | | | | 18-21; | |
| | | | | CK2_PHOSPHO_SITE | |
| | | | | 36-39; | |
| DEX0477_027.orf.4 | N | 0 - i1-112; | 34-58, 1.135; | PKC_PHOSPHO_SITE | |
| | | | 82-95, 1.112; | 38-40; MYRISTYL | |
| | | | 14-22, 1.103; | 90-95; | |
| | | | 65-73, 1.096; | TYR_PHOSPHO_SITE | |
| | | | | 105-112; MYRISTYL | |
| | | | | 13-18; MYRISTYL | |
| | | | | 84-89; | |
| | | | | PKC_PHOSPHO_SITE | |
| | | | | 60-62; | |
| | | | | PKC_PHOSPHO_SITE | |
| | | | | 69-71; | |
| | | | | PKC_PHOSPHO_SITE | |
| | | | | 33-35; | |
| | | | | CK2_PHOSPHO_SITE | |
| | | | | 93-96; | |
| DEX0477_027.aa.5 | N | 0 - o1-131; | 88-97, 1.192; | MYRISTYL 51-56; | Rhodanese 24-129; |
| | | | 74-83, 1.101; | AMIDATION 97-100; | RHOD 23-130; |
| | | | 51-67, 1.1; 4-37, | PKC_PHOSPHO_SITE | RHODANESE_3 33-131; |
| | | | 1.107; | 34-36; | |
| | | | 103-111, | CK2_PHOSPHO_SITE | |
| | | | 1.081; | 44-47; MYRISTYL | |
| | | | | 101-106; | |
| | | | | CK2_PHOSPHO_SITE | |
| | | | | 62-65; | |
| | | | | PKC_PHOSPHO_SITE | |
| | | | | 5-7; | |
| | | | | CK2_PHOSPHO_SITE | |
| | | | | 24-27; | |
| DEX0477_027.aa.6 | N | 0 - o1-108; | 80-88, 1.081; | CK2_PHOSPHO_SITE | RHODANESE_3 8-108; |
| | | | 51-60, 1.101; | 39-42; | |
| | | | 4-10, 1.234; | ASN_GLYCOSYLATION | |
| | | | 65-74, 1.192; | 21-24; MYRISTYL | |
| | | | 12-44, 1.117; | 78-83; | |
| | | | | PKC_PHOSPHO_SITE | |
| | | | | 23-25; MYRISTYL | |
| | | | | 8-13; AMIDATION | |
| | | | | 74-77; | |
| DEX0477_027.orf.6 | N | 0 - o1-132; | 93-102, 1.088; | MYRISTYL 28-33; | |
| | | | 24-44, 1.189; | PKC_PHOSPHO_SITE | |
| | | | 51-62, 1.17; | 54-56; | |
| | | | 4-17, 1.152; | PKC_PHOSPHO_SITE | |
| | | | 64-71, 1.141; | 18-20; MYRISTYL | |
| | | | 109-119, | 80-85; MYRISTYL | |
| | | | 1.256; | 106-111; | |
| | | | | CK2_PHOSPHO_SITE | |
| | | | | 61-64; | |
| DEX0477_027.aa.7 | N | 0 - o1-162; | 76-87, 1.108; | AMIDATION 128-131; | RHODANESE_3 75-162; |
| | | | 105-114, | CK2_PHOSPHO_SITE | |
| | | | 1.101; | 51-54; | |
| | | | 54-61, 1.141; | PKC_PHOSPHO_SITE | |
| | | | 119-128, | 44-46; MYRISTYL | |
| | | | 1.192; | 18-23; MYRISTYL | |
| | | | 134-142, | 132-137; | |
| | | | 1.081; | CK2_PHOSPHO_SITE | |
| | | | 41-52, 1.17; | 93-96; | |
| | | | 92-98, 1.06; | PKC_PHOSPHO_SITE | |
| | | | 14-34, 1.189; | 8-10; | |
| DEX0477_027.orf.7 | Y | 0 - o1-125; | 82-91, 1.192; | MYRISTYL 95-100; | RHODANESE_3 38-125; |
| | | | 4-14, 1.08; | CK2_PHOSPHO_SITE | |
| | | | 16-23, 1.146; | 56-59; | |
| | | | 97-105, 1.081; | PKC_PHOSPHO_SITE | |
| | | | 68-77, 1.101; | 3-5; AMIDATION | |
| | | | 55-61, 1.06; | 91-94; | |
| | | | 39-50, 1.108; | | |
| DEX0477_028.aa.1 | N | 1 - o1-1398; | 174-186, | PKC_PHOSPHO_SITE | A1pp 807-925; A1pp |
| | | tm1399-1421; | 1.175; | 1143-1145; | 1215-1334; A1pp |
| | | i1422-1815; | 1651-1659, | ASN_GLYCOSYLATION | 1019-1136; WWE |
| | | | 1.079; | 133-136; | 1537-1615; A1pp |
| | | | 1327-1345, | ASN_GLYCOSYLATION | 790-924; ATP_GTP_A |
| | | | 1.085; | 1651-1654; | 981-988; A1pp 1002-1135; |
| | | | 428-439, 1.13; | ASN_GLYCOSYLATION | |
| | | | 1378-1422, | 7-10; | |
| | | | 1.174; | CK2_PHOSPHO_SITE | |
| | | | 541-557, 1.14; | 968-971; | |
| | | | 1701-1706, | ASN_GLYCOSYLATION | |
| | | | 1.126; | 1712-1715; | |
| | | | 1015-1040, | CK2_PHOSPHO_SITE | |
| | | | 1.207; | 988-991; MYRISTYL | |
| | | | 659-673, | 771-776; | |
| | | | 1.168; | PKC_PHOSPHO_SITE | |
| | | | 1466-1472, | 1091-1093; | |
| | | | 1.066; | MYRISTYL 603-608; | |
| | | | 937-968, | CK2_PHOSPHO_SITE | |
| | | | 1.172; | 1150-1153; | |
| | | | 1279-1291, | ASN_GLYCOSYLATION | |
| | | | 1.13; | 1766-1769; | |
| | | | 377-393, | PKC_PHOSPHO_SITE | |
| | | | 1.088; | 1110-1112; | |
| | | | 1728-1734, | MYRISTYL 242-247; | |
| | | | 1.064; | CK2_PHOSPHO_SITE | |
| | | | 39-49, 1.162; | 1036-1039; | |
| | | | 1442-1463, | ASN_GLYCOSYLATION | |
| | | | 1.166; | 158-161; | |
| | | | 1580-1595, | ASN_GLYCOSYLATION | |
| | | | 1.085; | 1557-1560; | |
| | | | 255-261, | PKC_PHOSPHO_SITE | |
| | | | 1.073; | 453-455; MYRISTYL | |
| | | | 281-308, 1.16; | 772-777; | |
| | | | 1614-1622, | CK2_PHOSPHO_SITE | |
| | | | 1.081; | 1200-1203; | |
| | | | 1107-1119, | ASN_GLYCOSYLATION | |
| | | | 1.096; | 1738-1741; | |
| | | | 1605-1612, | PKC_PHOSPHO_SITE | |
| | | | 1.114; | 675-677; | |
| | | | 228-236, | CK2_PHOSPHO_SITE | |
| | | | 1.112; | 1224-1227; | |
| | | | 1311-1318, | ASN_GLYCOSYLATION | |
| | | | 1.158; | 146-149; | |
| | | | 417-424, | ASN_GLYCOSYLATION | |
| | | | 1.095; | 1556-1559; | |
| | | | 1718-1724, | MYRISTYL 818-823; | |
| | | | 1.05; | CK2_PHOSPHO_SITE | |
| | | | 798-809, | 1161-1164; | |
| | | | 1.245; | PKC_PHOSPHO_SITE | |
| | | | 407-414, | 69-71; | |
| | | | 1.053; | PKC_PHOSPHO_SITE | |
| | | | 833-841, | 732-734; MYRISTYL | |
| | | | 1.108; | 1697-1702; | |
| | | | 1629-1640, | CK2_PHOSPHO_SITE | |
| | | | 1.231; | 1451-1454; | |
| | | | 701-706, | MYRISTYL 1726-1731; | |
| | | | 1.057; | PKC_PHOSPHO_SITE | |
| | | | 60-65, 1.053; | 188-190; | |
| | | | 1788-1812, | TYR_PHOSPHO_SITE | |
| | | | 1.15; | 232-239; | |
| | | | 644-651, 1.11; | TYR_PHOSPHO_SITE | |
| | | | 684-693, | 1479-1486; | |
| | | | 1.149; | CK2_PHOSPHO_SITE | |
| | | | 1347-1368, | 1742-1745; | |
| | | | 1.225; | MYRISTYL 1087-1092; | |
| | | | 900-928, | MYRISTYL | |
| | | | 1.157; | 1055-1060; | |
| | | | 337-345, | CK2_PHOSPHO_SITE | |
| | | | 1.119; | 1786-1789; | |
| | | | 1749-1761, | ASN_GLYCOSYLATION | |
| | | | 1.228; | 1734-1737; | |
| | | | 1501-1515, | CK2_PHOSPHO_SITE | |
| | | | 1.142; | 1598-1601; | |
| | | | 776-796, | | |
| | | | 1.226; | MYRISTYL 977-982; | |
| | | | 1051-1066, | CK2_PHOSPHO_SITE | |
| | | | 1.139; | 1639-1642; | |
| | | | 1766-1774, | MYRISTYL 819-824; | |
| | | | 1.147; | CK2_PHOSPHO_SITE | |
| | | | 1295-1305, | 1472-1475; | |
| | | | 1.152; | CK2_PHOSPHO_SITE | |
| | | | 1070-1082, | 1736-1739; | |
| | | | 1.247; | ASN_GLYCOSYLATION | |
| | | | 975-983, | 1449-1452; | |
| | | | 1.063; | MYRISTYL 701-706; | |
| | | | 312-321, | CK2_PHOSPHO_SITE | |
| | | | 1.104; | 1473-1476; | |
| | | | 245-251, | CK2_PHOSPHO_SITE | |
| | | | 1.101; | 1615-1618; | |
| | | | 188-214, | ASN_GLYCOSYLATION | |
| | | | 1.102; | 1233-1236; | |
| | | | 709-733, 1.23; | MYRISTYL 1345-1350; | |
| | | | 1242-1255, | MYRISTYL | |
| | | | 1.103; | 1179-1184; | |
| | | | 592-598, | MYRISTYL 1244-1249; | |
| | | | 1.061; | ASN_GLYCOSYLATION | |
| | | | 580-585, | 1309-1312; | |
| | | | 1.063; | CK2_PHOSPHO_SITE | |
| | | | 752-762, | 79-82; MYRISTYL | |
| | | | 1.116; | 1319-1324; | |
| | | | 1196-1205, | ASN_GLYCOSYLATION | |
| | | | 1.063; | 642-645; | |
| | | | 1212-1221, | ASN_GLYCOSYLATION | |
| | | | 1.124; | 1499-1502; | |
| | | | 522-536, | CK2_PHOSPHO_SITE | |
| | | | 1.123; | 1688-1691; | |
| | | | 113-119, | ASN_GLYCOSYLATION | |
| | | | 1.074; | 1086-1089; | |
| | | | 1429-1436; | ASN_GLYCOSYLATION | |
| | | | 1.1; | 850-853; | |
| | | | 993-999, | CK2_PHOSPHO_SITE | |
| | | | 1.101; | 1540-1543; | |
| | | | 1541-1548, | MYRISTYL 1009-1014; | |
| | | | 1.077; | MYRISTYL | |
| | | | 1258-1265, | 1686-1691; | |
| | | | 1.078; | PKC_PHOSPHO_SITE | |
| | | | 5-22, 1.131; | 207-209; | |
| | | | 1529-1535, | PKC_PHOSPHO_SITE | |
| | | | 1.075; | 200-202; | |
| | | | 1001-1009, | ASN_GLYCOSYLATION | |
| | | | 1.132; | 808-811; MYRISTYL | |
| | | | 149-159, 1.18; | 1053-1058; | |
| | | | 1148-1161, | MYRISTYL 1375-1380; | |
| | | | 1.178; | PKC_PHOSPHO_SITE | |
| | | | 263-269, | 1442-1444; | |
| | | | 1.069; | PKC_PHOSPHO_SITE | |
| | | | 133-142, | 352-354; | |
| | | | 1.138; | CK2_PHOSPHO_SITE | |
| | | | 559-575, | 873-876; | |
| | | | 1.175; | CK2_PHOSPHO_SITE | |
| | | | 630-641, | 810-813; | |
| | | | 1.181; | AMIDATION 597-600; | |
| | | | 348-360, | PKC_PHOSPHO_SITE | |
| | | | 1.087; | 348-350; | |
| | | | 815-827, | CK2_PHOSPHO_SITE | |
| | | | 1.091; | 628-631; | |
| | | | 71-79, 1.134; | PKC_PHOSPHO_SITE | |
| | | | 1228-1234, | 1812-1814; | |
| | | | 1.091; | PKC_PHOSPHO_SITE | |
| | | | 877-897, | 415-417; | |
| | | | 1.225; | AMIDATION 1747-1750; | |
| | | | 1643-1649, | PKC_PHOSPHO_SITE | |
| | | | 1.039; | 644-646; | |
| | | | 745-750, 1.03; | PKC_PHOSPHO_SITE | |
| | | | 1131-1142, | 444-446; | |
| | | | 1.127; | CK2_PHOSPHO_SITE | |
| | | | 462-518, | 707-710; | |
| | | | 1.189; | PKC_PHOSPHO_SITE | |
| | | | 856-870, | 380-382; | |
| | | | 1.185; | CK2_PHOSPHO_SITE | |
| | | | | 395-398; | |
| | | | | CAMP_PHOSPHO_SITE | |
| | | | | 1677-1680; | |
| | | | | CK2_PHOSPHO_SITE | |
| | | | | 273-276; | |
| | | | | PKC_PHOSPHO_SITE | |
| | | | | 216-218; | |
| | | | | CAMP_PHOSPHO_SITE | |
| | | | | 1577-1580; | |
| | | | | PKC_PHOSPHO_SITE | |
| | | | | 230-232; | |
| | | | | PKC_PHOSPHO_SITE | |
| | | | | 950-952; | |
| | | | | CK2_PHOSPHO_SITE | |
| | | | | 415-418; | |
| | | | | CK2_PHOSPHO_SITE | |
| | | | | 98-101; | |
| | | | | PKC_PHOSPHO_SITE | |
| | | | | 399-401; | |
| | | | | CK2_PHOSPHO_SITE | |
| | | | | 163-166; | |
| | | | | CK2_PHOSPHO_SITE | |
| | | | | 472-475; | |
| | | | | PKC_PHOSPHO_SITE | |
| | | | | 1183-1185; | |
| | | | | CK2_PHOSPHO_SITE | |
| | | | | 453-456; | |
| | | | | PKC_PHOSPHO_SITE | |
| | | | | 1349-1351; | |
| DEX0477_028.aa.2 | N | 0 - o1-1744; | 312-321, | MYRISTYL 1615-1620; | WWE 1466-1544; A1pp |
| | | | 1.104; | ASN_GLYCOSYLATION | 975-1092; A1pp |
| | | | 245-251, | 133-136; | 1171-1290; A1pp |
| | | | 1.101; | CK2_PHOSPHO_SITE | 807-925; A1pp 790-924; |
| | | | 1235-1247, | 1117-1120; | A1pp 958-1091; |
| | | | 1.13; | CK2_PHOSPHO_SITE | |
| | | | 1251-1261, | 1156-1159; | |
| | | | 1.152; | CAMP_PHOSPHO_SITE | |
| | | | 900-928, | 1606-1609; | |
| | | | 1.157; | PKC_PHOSPHO_SITE | |
| | | | 709-733, 1.23; | 380-382; | |
| | | | 5-22, 1.131; | ASN_GLYCOSYLATION | |
| | | | 1334-1351, | 7-10; | |
| | | | 1.1; | CK2_PHOSPHO_SITE | |
| | | | 644-651, 1.11; | 415-418; | |
| | | | 1558-1569, | CK2_PHOSPHO_SITE | |
| | | | 1.231; | 992-995; | |
| | | | 630-641, | CAMP_PHOSPHO_SITE | |
| | | | 1.181; | 1506-1509; | |
| | | | 1678-1690, | PKC_PHOSPHO_SITE | |
| | | | 1.228; | 1047-1049; | |
| | | | 1358-1365, | MYRISTYL 1655-1660; | |
| | | | 1.1; | PKC_PHOSPHO_SITE | |
| | | | 1104-1117, | 352-354; | |
| | | | 1.178; | ASN_GLYCOSYLATION | |
| | | | 833-841, | 1485-1488; | |
| | | | 1.108; | AMIDATION 597-600; | |
| | | | 1572-1578 | PKC_PHOSPHO_SITE | |
| | | | 1.039; | 1099-1101; | |
| | | | 281-308, 1.16; | CK2_PHOSPHO_SITE | |
| | | | 776-796, | 1380-1383; | |
| | | | 1.226; | ASN_GLYCOSYLATION | |
| | | | 337-345, | 1428-1431; | |
| | | | 1.119; | CK2_PHOSPHO_SITE | |
| | | | 971-996, | 810-813; | |
| | | | 1.207; | ASN_GLYCOSYLATION | |
| | | | 1184-1190, | 1378-1381; | |
| | | | 1.091; | PKC_PHOSPHO_SITE | |
| | | | 752-762, | 399-401; | |
| | | | 1.116; | ASN_GLYCOSYLATION | |
| | | | 701-706, | 1486-1489; | |
| | | | 1.057; | CK2_PHOSPHO_SITE | |
| | | | 462-518, | 873-876; | |
| | | | 1.189; | AMIDATION 1676-1679; | |
| | | | 1647-1653, | PKC_PHOSPHO_SITE | |
| | | | 1.05; | 69-71; | |
| | | | 1063-1075, | PKC_PHOSPHO_SITE | |
| | | | 1.096; | 415-417; MYRISTYL | |
| | | | 559-575, | 1301-1306; | |
| | | | 1.175; | CK2_PHOSPHO_SITE | |
| | | | 228-236, | 1180-1183; | |
| | | | 1.112; | CK2_PHOSPHO_SITE | |
| | | | 417-424, | 453-456; | |
| | | | 1.095; | CK2_PHOSPHO_SITE | |
| | | | 149-159, 1.18; | 1527-1530; | |
| | | | 1087-1098, | PKC_PHOSPHO_SITE | |
| | | | 1.127; | 188-190; | |
| | | | 745-750, 1.03; | CK2_PHOSPHO_SITE | |
| | | | 1534-1541, | 395-398; MYRISTYL | |
| | | | 1.114; | 1331-1336; | |
| | | | 856-870, | PKC_PHOSPHO_SITE | |
| | | | 1.185; | 230-232; | |
| | | | 428-439, 1.13; | CK2_PHOSPHO_SITE | |
| | | | 407-414, | 1544-1547; | |
| | | | 1.053; | CK2_PHOSPHO_SITE | |
| | | | 877-897, | 1665-1668; | |
| | | | 1.225; | ASN_GLYCOSYLATION | |
| | | | 659-673, | 146-149; | |
| | | | 1.168; | ASN_GLYCOSYLATION | |
| | | | 937-965, | 1265-1268; | |
| | | | 1.172; | CK2_PHOSPHO_SITE | |
| | | | 1470-1477, | 1671-1674; | |
| | | | 1.077; | PKC_PHOSPHO_SITE | |
| | | | 1214-1221, | 348-350; | |
| | | | 1.078; | ASN_GLYCOSYLATION | |
| | | | 1458-1464, | 1042-1045; | |
| | | | 1.075; | MYRISTYL 819-824; | |
| | | | 1580-1588, | MYRISTYL 1626-1631; | |
| | | | 1.079; | PKC_PHOSPHO_SITE | |
| | | | 1303-1324, | 216-218; | |
| | | | 1.225; | CK2_PHOSPHO_SITE | |
| | | | 255-261, | 628-631; | |
| | | | 1.073; | PKC_PHOSPHO_SITE | |
| | | | 1509-1524, | 207-209; | |
| | | | 1.085; | ASN_GLYCOSYLATION | |
| | | | 377-393, | 808-811; | |
| | | | 1.088; | CK2_PHOSPHO_SITE | |
| | | | 1630-1635, | 1617-1620; | |
| | | | 1.126; | CK2_PHOSPHO_SITE | |
| | | | 1168-1177, | 472-475; | |
| | | | 1.124; | ASN_GLYCOSYLATION | |
| | | | 174-186, | 158-161; | |
| | | | 1.175; | CK2_PHOSPHO_SITE | |
| | | | 113-119, | 1106-1109; | |
| | | | 1.074; | PKC_PHOSPHO_SITE | |
| | | | 1543-1551, | 200-202; | |
| | | | 1.081; | CK2_PHOSPHO_SITE | |
| | | | 1371-1392, | 1568-1571; | |
| | | | 1.166; | MYRISTYL 701-706; | |
| | | | 1395-1401, | ASN_GLYCOSYLATION | |
| | | | 1.066; | 1667-1670; | |
| | | | 60-65, 1.053; | MYRISTYL 818-823; | |
| | | | 133-142, | MYRISTYL 771-776; | |
| | | | 1.138; | CK2_PHOSPHO_SITE | |
| | | | 684-693, | 79-82; MYRISTYL | |
| | | | 1.149; | 772-777; | |
| | | | 1152-1161, | PKC_PHOSPHO_SITE | |
| | | | 1.063; | 675-677; MYRISTYL | |
| | | | 522-536, | 603-608; | |
| | | | 1.123; | ASN_GLYCOSYLATION | |
| | | | 815-827, | 642-645; | |
| | | | 1.091; | CK2_PHOSPHO_SITE | |
| | | | 39-49, 1.162; | 707-710; | |
| | | | 263-269, | PKC_PHOSPHO_SITE | |
| | | | 1.069; | 444-446; | |
| | | | 1717-1714, | TYR_PHOSPHO_SITE | |
| | | | 1.15; | 232-239; | |
| | | | 71-79, 1.134; | CK2_PHOSPHO_SITE | |
| | | | 1007-1022, | 163-166; | |
| | | | 1.139; | PKC_PHOSPHO_SITE | |
| | | | 1267-1274, | 453-455; MYRISTYL | |
| | | | 1.158; | 1009-1014; | |
| | | | 798-809, | MYRISTYL 1011-1016; | |
| | | | 1.245; | PKC_PHOSPHO_SITE | |
| | | | 1695-1703, | 644-646; | |
| | | | 1.147; | ASN_GLYCOSYLATION | |
| | | | 1657-1663, | 850-853; MYRISTYL | |
| | | | 1.064; | 965-970; | |
| | | | 1026-1038, | ASN_GLYCOSYLATION | |
| | | | 1.247; | 1641-1644; | |
| | | | 1430-1444, | PKC_PHOSPHO_SITE | |
| | | | 1.142; | 732-734; | |
| | | | 580-585, | CK2_PHOSPHO_SITE | |
| | | | 1.063; | 1715-1718; | |
| | | | 1198-1211, | ASN_GLYCOSYLATION | |
| | | | 1.103; | 1580-1583; | |
| | | | 1283-1301, | PKC_PHOSPHO_SITE | |
| | | | 1.085; | 1371-1373; | |
| | | | 541-557, 1.14; | MYRISTYL 1135-1140; | |
| | | | 188-214, | ASN_GLYCOSYLATION | |
| | | | 1.102; | 1189-1192; | |
| | | | 348-360, | PKC_PHOSPHO_SITE | |
| | | | 1.087; | 1305-1307; | |
| | | | 592-598, | PKC_PHOSPHO_SITE | |
| | | | 1.061; | 950-952; MYRISTYL | |
| | | | | 1275-1280; | |
| | | | | CK2_PHOSPHO_SITE | |
| | | | | 1469-1472; | |
| | | | | CK2_PHOSPHO_SITE | |
| | | | | 273-276; MYRISTYL | |
| | | | | 1200-1205; | |
| | | | | PKC_PHOSPHO_SITE | |
| | | | | 1066-1068; | |
| | | | | CK2_PHOSPHO_SITE | |
| | | | | 1402-1405; | |
| | | | | ASN_GLYCOSYLATION | |
| | | | | 1695-1698; | |
| | | | | CK2_PHOSPHO_SITE | |
| | | | | 1401-1404; | |
| | | | | CK2_PHOSPHO_SITE | |
| | | | | 98-101; MYRISTYL | |
| | | | | 1043-1048; | |
| | | | | TYR_PHOSPHO_SITE | |
| | | | | 1408-1415; | |
| | | | | ASN_GLYCOSYLATION | |
| | | | | 1663-1666; | |
| | | | | PKC_PHOSPHO_SITE | |
| | | | | 1139-1141; | |
| | | | | PKC_PHOSPHO_SITE | |
| | | | | 1741-1743; | |
| | | | | MYRISTYL 242-247; | |
| DEX0477_028.orf.2 | N | 0 - o1-968; | | CK2_PHOSPHO_SITE | A1pp 806-924; A1pp |
| | | | | 872-875; | 789-923; |
| | | | | ASN_GLYCOSYLATION | |
| | | | | 641-644; | |
| | | | | PKC_PHOSPHO_SITE | |
| | | | | 199-201; | |
| | | | | CK2_PHOSPHO_SITE | |
| | | | | 78-81; | |
| | | | | CK2_PHOSPHO_SITE | |
| | | | | 809-812; | |
| | | | | PKC_PHOSPHO_SITE | |
| | | | | 452-454; | |
| | | | | PKC_PHOSPHO_SITE | |
| | | | | 351-353; | |
| | | | | CK2_PHOSPHO_SITE | |
| | | | | 706-709; | |
| | | | | PKC_PHOSPHO_SITE | |
| | | | | 379-381; | |
| | | | | TYR_PHOSPHO_SITE | |
| | | | | 231-238; MYRISTYL | |
| | | | | 818-823; | |
| | | | | PKC_PHOSPHO_SITE | |
| | | | | 731-733; | |
| | | | | ASN_GLYCOSYLATION | |
| | | | | 807-810; | |
| | | | | PKC_PHOSPHO_SITE | |
| | | | | 398-400; | |
| | | | | CK2_PHOSPHO_SITE | |
| | | | | 394-397; | |
| | | | | ASN_GLYCOSYLATION | |
| | | | | 849-852; | |
| | | | | PKC_PHOSPHO_SITE | |
| | | | | 206-208; | |
| | | | | PKC_PHOSPHO_SITE | |
| | | | | 443-445; | |
| | | | | PKC_PHOSPHO_SITE | |
| | | | | 414-416; | |
| | | | | CK2_PHOSPHO_SITE | |
| | | | | 471-474; MYRISTYL | |
| | | | | 817-822; | |
| | | | | CK2_PHOSPHO_SITE | |
| | | | | 627-630; MYRISTYL | |
| | | | | 771-776; | |
| | | | | CK2_PHOSPHO_SITE | |
| | | | | 97-100; | |
| | | | | PKC_PHOSPHO_SITE | |
| | | | | 187-189; | |
| | | | | CK2_PHOSPHO_SITE | |
| | | | | 452-455; | |
| | | | | PKC_PHOSPHO_SITE | |
| | | | | 68-70; | |
| | | | | ASN_GLYCOSYLATION | |
| | | | | 6-9; | |
| | | | | PKC_PHOSPHO_SITE | |
| | | | | 674-676; | |
| | | | | CK2_PHOSPHO_SITE | |
| | | | | 272-275; MYRISTYL | |
| | | | | 770-775; | |
| | | | | PKC_PHOSPHO_SITE | |
| | | | | 643-645; | |
| | | | | ASN_GLYCOSYLATION | |
| | | | | 132-135; | |
| | | | | PKC_PHOSPHO_SITE | |
| | | | | 347-349; | |
| | | | | CK2_PHOSPHO_SITE | |
| | | | | 414-417; | |
| | | | | ASN_GLYCOSYLATION | |
| | | | | 157-160; MYRISTYL | |
| | | | | 241-246; | |
| | | | | PKC_PHOSPHO_SITE | |
| | | | | 949-951; | |
| | | | | ASN_GLYCOSYLATION | |
| | | | | 145-148; | |
| | | | | AMIDATION 596-599; | |
| | | | | MYRISTYL | |
| | | | | 602-607; | |
| | | | | CK2_PHOSPHO_SITE | |
| | | | | 162-165; | |
| | | | | PKC_PHOSPHO_SITE | |
| | | | | 215-217; MYRISTYL | |
| | | | | 700-705; | |
| | | | | PKC_PHOSPHO_SITE | |
| | | | | 229-231; | |
| DEX0477_028.orf.3 | N | 0 - o1-968; | | CK2_PHOSPHO_SITE | Alpp 806-924; Alpp |
| | | | | 872-875; MYRISTYL | 789-923; |
| | | | | 771-776; | |
| | | | | PKC_PHOSPHO_SITE | |
| | | | | 199-201; | |
| | | | | ASN_GLYCOSYLATION | |
| | | | | 641-644; MYRISTYL | |
| | | | | 770-775; | |
| | | | | PKC_PHOSPHO_SITE | |
| | | | | 731-733; | |
| | | | | ASN_GLYCOSYLATION | |
| | | | | 807-810; | |
| | | | | PKC_PHOSPHO_SITE | |
| | | | | 452-454; MYRISTYL | |
| | | | | 241-246; | |
| | | | | ASN_GLYCOSYLATION | |
| | | | | 132-135; | |
| | | | | CK2_PHOSPHO_SITE | |
| | | | | 627-630; | |
| | | | | PKC_PHOSPHO_SITE | |
| | | | | 643-645; | |
| | | | | CK2_PHOSPHO_SITE | |
| | | | | 471-474; | |
| | | | | PKC_PHOSPHO_SITE | |
| | | | | 68-70; MYRISTYL | |
| | | | | 700-705; | |
| | | | | CK2_PHOSPHO_SITE | |
| | | | | 162-165; | |
| | | | | PKC_PHOSPHO_SITE | |
| | | | | 674-676; | |
| | | | | ASN_GLYCOSYLATION | |
| | | | | 849-852; | |
| | | | | PKC_PHOSPHO_SITE | |
| | | | | 398-400; | |
| | | | | TYR_PHOSPHO_SITE | |
| | | | | 231-238; | |
| | | | | CK2_PHOSPHO_SITE | |
| | | | | 394-397; | |
| | | | | PKC_PHOSPHO_SITE | |
| | | | | 215-217; | |
| | | | | CK2_PHOSPHO_SITE | |
| | | | | 706-709; | |
| | | | | CK2_PHOSPHO_SITE | |
| | | | | 272-275; | |
| | | | | PKC_PHOSPHO_SITE | |
| | | | | 206-208; | |
| | | | | ASN_GLYCOSYLATION | |
| | | | | 6-9; | |
| | | | | CK2_PHOSPHO_SITE | |
| | | | | 809-812; | |
| | | | | CK2_PHOSPHO_SITE | |
| | | | | 452-455; | |
| | | | | CK2_PHOSPHO_SITE | |
| | | | | 78-81; | |
| | | | | PKC_PHOSPHO_SITE | |
| | | | | 229-231; | |
| | | | | CK2_PHOSPHO_SITE | |
| | | | | 97-100; MYRISTYL | |
| | | | | 818-823; | |
| | | | | PKC_PHOSPHO_SITE | |
| | | | | 379-381; | |
| | | | | ASN_GLYCOSYLATION | |
| | | | | 145-148; | |
| | | | | PKC_PHOSPHO_SITE | |
| | | | | 351-353; | |
| | | | | PKC_PHOSPHO_SITE | |
| | | | | 949-951; MYRISTYL | |
| | | | | 602-607; | |
| | | | | PKC_PHOSPHO_SITE | |
| | | | | 347-349; | |
| | | | | PKC_PHOSPHO_SITE | |
| | | | | 443-445; | |
| | | | | PKC_PHOSPHO_SITE | |
| | | | | 187-189; | |
| | | | | CK2_PHOSPHO_SITE | |
| | | | | 414-417; | |
| | | | | AMIDATION 596-599; | |
| | | | | MYRISTYL | |
| | | | | 817-822; | |
| | | | | PKC_PHOSPHO_SITE | |
| | | | | 414-416; | |
| | | | | ASN_GLYCOSYLATION | |
| | | | | 157-160; | |
| DEX0477_028.orf.4 | N | 0 - o1-968; | | PKC_PHOSPHO_SITE | Alpp 789-923; Alpp |
| | | | | 206-208; | 806-924; |
| | | | | PKC_PHOSPHO_SITE | |
| | | | | 452-454; | |
| | | | | ASN_GLYCOSYLATION | |
| | | | | 641-644; MYRISTYL | |
| | | | | 771-776; | |
| | | | | PKC_PHOSPHO_SITE | |
| | | | | 199-201; | |
| | | | | CK2_PHOSPHO_SITE | |
| | | | | 872-875; | |
| | | | | PKC_PHOSPHO_SITE | |
| | | | | 643-645; | |
| | | | | ASN_GLYCOSYLATION | |
| | | | | 807-810; | |
| | | | | PKC_PHOSPHO_SITE | |
| | | | | 398-400; | |
| | | | | TYR_PHOSPHO_SITE | |
| | | | | 231-238; | |
| | | | | PKC_PHOSPHO_SITE | |
| | | | | 215-217; | |
| | | | | PKC_PHOSPHO_SITE | |
| | | | | 414-416; | |
| | | | | CK2_PHOSPHO_SITE | |
| | | | | 452-455; | |
| | | | | PKC_PHOSPHO_SITE | |
| | | | | 187-189; MYRISTYL | |
| | | | | 817-822; | |
| | | | | PKC_PHOSPHO_SITE | |
| | | | | 351-353; MYRISTYL | |
| | | | | 241-246; | |
| | | | | CK2_PHOSPHO_SITE | |
| | | | | 78-81; | |
| | | | | PKC_PHOSPHO_SITE | |
| | | | | 347-349; MYRISTYL | |
| | | | | 602-607; | |
| | | | | PKC_PHOSPHO_SITE | |
| | | | | 229-231; | |
| | | | | PKC_PHOSPHO_SITE | |
| | | | | 674-676; | |
| | | | | PKC_PHOSPHO_SITE | |
| | | | | 68-70; | |
| | | | | CK2_PHOSPHO_SITE | |
| | | | | 162-165; MYRISTYL | |
| | | | | 770-775; | |
| | | | | CK2_PHOSPHO_SITE | |
| | | | | 97-100; | |
| | | | | ASN_GLYCOSYLATION | |
| | | | | 157-160; | |
| | | | | CK2_PHOSPHO_SITE | |
| | | | | 394-397; | |
| | | | | ASN_GLYCOSYLATION | |
| | | | | 132-135; | |
| | | | | CK2_PHOSPHO_SITE | |
| | | | | 471-474; MYRISTYL | |
| | | | | 700-705; | |
| | | | | PKC_PHOSPHO_SITE | |
| | | | | 731-733; | |
| | | | | ASN_GLYCOSYLATION | |
| | | | | 145-148; | |
| | | | | PKC_PHOSPHO_SITE | |
| | | | | 949-951; | |
| | | | | CK2_PHOSPHO_SITE | |
| | | | | 414-417; | |
| | | | | CK2_PHOSPHO_SITE | |
| | | | | 809-812; | |
| | | | | ASN_GLYCOSYLATION | |
| | | | | 849-852; | |
| | | | | CK2_PHOSPHO_SITE | |
| | | | | 627-630; | |
| | | | | AMIDATION 596-599; | |
| | | | | CK2_PHOSPHO_SITE | |
| | | | | 272-275; | |
| | | | | ASN_GLYCOSYLATION | |
| | | | | 6-9; MYRISTYL | |
| | | | | 818-823; | |
| | | | | PKC_PHOSPHO_SITE | |
| | | | | 379-381; | |
| | | | | CK2_PHOSPHO_SITE | |
| | | | | 706-709; | |
| | | | | PKC_PHOSPHO_SITE | |
| | | | | 443-445; | |
| DEX0477_029.aa.1 | N | 0 - o1-1744; | 1395-1401, | PKC_PHOSPHO_SITE | Alpp 807-925; Alpp |
| | | | 1.066; | 230-232; | 975-1092; WWE 1466-1544; |
| | | | 1198-1211, | ASN_GLYCOSYLATION | Alpp 1171-1290; |
| | | | 1.103; | 808-811; | Alpp 958-1091; |
| | | | 1267-1274, | PKC_PHOSPHO_SITE | Alpp 790-924; |
| | | | 1.158; | 1741-1743; | |
| | | | 407-414, | MYRISTYL 1043-1048; | |
| | | | 1.053; | PKC_PHOSPHO_SITE | |
| | | | 971-996, | 348-350; | |
| | | | 1.207; | CK2_PHOSPHO_SITE | |
| | | | 1630-1635, | 395-398; MYRISTYL | |
| | | | 1.126; | 1135-1140; | |
| | | | 580-585, | PKC_PHOSPHO_SITE | |
| | | | 1.063; | 415-417; MYRISTYL | |
| | | | 377-393, | 603-608; | |
| | | | 1.088; | PKC_PHOSPHO_SITE | |
| | | | 1371-1392, | 380-382; | |
| | | | 1.166; | CK2_PHOSPHO_SITE | |
| | | | 630-641, | 273-276; | |
| | | | 1.181; | PKC_PHOSPHO_SITE | |
| | | | 1543-1551, | 188-190; MYRISTYL | |
| | | | 1.081; | 1275-1280; | |
| | | | 1430-1444, | CK2_PHOSPHO_SITE | |
| | | | 1.142; | 98-101; | |
| | | | 877-897, | PKC_PHOSPHO_SITE | |
| | | | 1.225; 5-22, | 352-354; | |
| | | | 1.131; | ASN_GLYCOSYLATION | |
| | | | 312-321, | 146-149; | |
| | | | 1.104; | PKC_PHOSPHO_SITE | |
| | | | 462-518, | 675-677; | |
| | | | 1.189; | TYR_PHOSPHO_SITE | |
| | | | 428-439, 1.13; | 232-239; MYRISTYL | |
| | | | 541-557, 1.14; | 701-706; | |
| | | | 255-261, | CK2_PHOSPHO_SITE | |
| | | | 1.073; | 1544-1547; | |
| | | | 113-119, | CK2_PHOSPHO_SITE | |
| | | | 1.074; | 163-166; MYRISTYL | |
| | | | 709-733, 1.23; | 1200-1205; | |
| | | | 1104-1117, | CK2_PHOSPHO_SITE | |
| | | | 1.178; | 1568-1571; | |
| | | | 937-965, | ASN_GLYCOSYLATION | |
| | | | 1.172; | 158-161; | |
| | | | 856-870, | PKC_PHOSPHO_SITE | |
| | | | 1.185; | 1139-1141; | |
| | | | 149-159, 1.18; | PKC_PHOSPHO_SITE | |
| | | | 1695-1703, | 453-455; | |
| | | | 1.147; | CK2_PHOSPHO_SITE | |
| | | | 745-750, 1.03; | 1671-1674; | |
| | | | 1152-1161, | CK2_PHOSPHO_SITE | |
| | | | 1.063; | 453-456; | |
| | | | 833-841, | AMIDATION 1676-1679; | |
| | | | 1.108; | PKC_PHOSPHO_SITE | |
| | | | 1572-1578, | 200-202; | |
| | | | 1.039; | CK2_PHOSPHO_SITE | |
| | | | 1235-1247, | 1617-1620; | |
| | | | 1.13; | ASN_GLYCOSYLATION | |
| | | | 1283-1301, | 1485-1488; | |
| | | | 1.085; | CK2_PHOSPHO_SITE | |
| | | | 1647-1653, | 1665-1668; | |
| | | | 1.05; | PKC_PHOSPHO_SITE | |
| | | | 659-673, | 207-209; | |
| | | | 1.168; | PKC_PHOSPHO_SITE | |
| | | | 71-79, 1.134; | | |
| | | | 174-186, | | |
| | | | 1.175; | 216-218; | |
| | | | 348-360, | CK2_PHOSPHO_SITE | |
| | | | 1.087; | 873-876; | |
| | | | 1063-1075, | AMIDATION 597-600; | |
| | | | 1.096; | TYR_PHOSPHO_SITE | |
| | | | 417-424, | 1408-1415; | |
| | | | 1.095; | ASN_GLYCOSYLATION | |
| | | | 701-706, | 1641-1644; | |
| | | | 1.057; | CK2_PHOSPHO_SITE | |
| | | | 1717-1741, | 415-418; | |
| | | | 1.15; | CK2_PHOSPHO_SITE | |
| | | | 1184-1190, | 1715-1718; | |
| | | | 1.091; | MYRISTYL 1655-1660; | |
| | | | 1334-1351, | MYRISTYL | |
| | | | 1.1; | 1615-1620; | |
| | | | 1509-1524, | PKC_PHOSPHO_SITE | |
| | | | 1.085; | 399-401; | |
| | | | 776-796, | PKC_PHOSPHO_SITE | |
| | | | 1.226; | 1099-1101; | |
| | | | 1303-1324, | CK2_PHOSPHO_SITE | |
| | | | 1.225; | 992-995; | |
| | | | 559-575, | ASN_GLYCOSYLATION | |
| | | | 1.175; | 1663-1666; | |
| | | | 1358-1365, | ASN_GLYCOSYLATION | |
| | | | 1.1; | 850-853; | |
| | | | 1534-1541, | CK2_PHOSPHO_SITE | |
| | | | 1.114; | 1117-1120; | |
| | | | 1678-1690, | ASN_GLYCOSYLATION | |
| | | | 1.228; | 642-645; | |
| | | | 245-251, | PKC_PHOSPHO_SITE | |
| | | | 1.101; | 444-446; | |
| | | | 684-693, | CK2_PHOSPHO_SITE | |
| | | | 1.149; | 1106-1109; | |
| | | | 133-142, | ASN_GLYCOSYLATION | |
| | | | 1.138; | 1580-1583; | |
| | | | 815-827, | CK2_PHOSPHO_SITE | |
| | | | 1.091; | 1180-1183; | |
| | | | 644-651, 1.11; | MYRISTYL 1626-1631; | |
| | | | 337-345, | ASN_GLYCOSYLATION | |
| | | | 1.119; | 1189-1192; | |
| | | | 1251-1261, | ASN_GLYCOSYLATION | |
| | | | 1.152; | 1486-1489; | |
| | | | 1007-1022, | CK2_PHOSPHO_SITE | |
| | | | 1.139; | 1156-1159; | |
| | | | 1026-1038, | MYRISTYL 819-824; | |
| | | | 1.247; | PKC_PHOSPHO_SITE | |
| | | | 1087-1098, | 732-734; | |
| | | | 1.127; | CK2_PHOSPHO_SITE | |
| | | | 188-214, | 810-813; | |
| | | | 1.102; | ASN_GLYCOSYLATION | |
| | | | 592-598, | 1378-1381; | |
| | | | 1.061; | PKC_PHOSPHO_SITE | |
| | | | 1214-1221, | 950-952; | |
| | | | 1.078; | ASN_GLYCOSYLATION | |
| | | | 39-49, 1.162; | 1695-1698; | |
| | | | 522-536, | PKC_PHOSPHO_SITE | |
| | | | 1.123; | 1047-1049; | |
| | | | 752-762, | CK2_PHOSPHO_SITE | |
| | | | 1.116; | 1469-1472; | |
| | | | 1580-1588, | CAMP_PHOSPHO_SITE | |
| | | | 1.079; | 1606-1609; | |
| | | | 281-308, 1.16; | ASN_GLYCOSYLATION | |
| | | | 60-65, 1.053; | 1667-1670; | |
| | | | 1657-1663, | MYRISTYL 1301-1306; | |
| | | | 1.064; | PKC_PHOSPHO_SITE | |
| | | | 1458-1464, | 69-71; MYRISTYL | |
| | | | 1.075; | 1331-1336; | |
| | | | 228-236, | ASN_GLYCOSYLATION | |
| | | | 1.112; | 1042-1045; | |
| | | | 900-928, | CK2_PHOSPHO_SITE | |
| | | | 1.157; | 1380-1383; | |
| | | | 1168-1177, | MYRISTYL 772-777; | |
| | | | 1.124; | MYRISTYL 1011-1016; | |
| | | | 1470-1477, | ASN_GLYCOSYLATION | |
| | | | 1.077; | 1428-1431; | |
| | | | 263-269, | PKC_PHOSPHO_SITE | |
| | | | 1.069; | 644-646; | |
| | | | 798-809, | PKC_PHOSPHO_SITE | |
| | | | 1.245; | 1066-1068; | |
| | | | 1558-1569, | MYRISTYL 771-776; | |
| | | | 1.231; | ASN_GLYCOSYLATION | |
| | | | | 133-136; | |
| | | | | PKC_PHOSPHO_SITE | |
| | | | | 1371-1373; | |
| | | | | CK2_PHOSPHO_SITE | |
| | | | | 1527-1530; | |
| | | | | ASN_GLYCOSYLATION | |
| | | | | 1265-1268; | |
| | | | | MYRISTYL 242-247; | |
| | | | | CK2_PHOSPHO_SITE | |
| | | | | 1401-1404; | |
| | | | | ASN_GLYCOSYLATION | |
| | | | | 7-10; MYRISTYL | |
| | | | | 1009-1014; | |
| | | | | PKC_PHOSPHO_SITE | |
| | | | | 1305-1307; | |
| | | | | CK2_PHOSPHO_SITE | |
| | | | | 1402-1405; | |
| | | | | CK2_PHOSPHO_SITE | |
| | | | | 79-82; | |
| | | | | CK2_PHOSPHO_SITE | |
| | | | | 707-710; | |
| | | | | CK2_PHOSPHO_SITE | |
| | | | | 472-475; | |
| | | | | CAMP_PHOSPHO_SITE | |
| | | | | 1506-1509; | |
| | | | | MYRISTYL 965-970; | |
| | | | | CK2_PHOSPHO_SITE | |
| | | | | 628-631; MYRISTYL | |
| | | | | 818-823; | |
| DEX0477_029.orf.1 | N | 0 - o1-968; | 643-650, 1.11; | CK2_PHOSPHO_SITE | Alpp 789-923; Alpp |
| | | | 579-584, | 627-630; MYRISTYL | 806-924; |
| | | | 1.063; | 817-822; | |
| | | | 540-556, 1.14; | PKC_PHOSPHO_SITE | |
| | | | 832-840, | 379-381; | |
| | | | 1.108; | PKC_PHOSPHO_SITE | |
| | | | 558-574, | 643-645; MYRISTYL | |
| | | | 1.175; | 771-776; | |
| | | | 591-597, | ASN_GLYCOSYLATION | |
| | | | 1.061; | 849-852; MYRISTYL | |
| | | | 311-320, | 818-823; | |
| | | | 1.104; | CK2_PHOSPHO_SITE | |
| | | | 936-959, | 471-474; | |
| | | | 1.172; | PKC_PHOSPHO_SITE | |
| | | | 899-927, | 206-208; | |
| | | | 1.157; | ASN_GLYCOSYLATION | |
| | | | 173-185, | 807-810; MYRISTYL | |
| | | | 1.175; | 770-775; | |
| | | | 521-535, | CK2_PHOSPHO_SITE | |
| | | | 1.123; | 414-417; | |
| | | | 376-392, | PKC_PHOSPHO_SITE | |
| | | | 1.088; | 452-454; | |
| | | | 658-672, | PKC_PHOSPHO_SITE | |
| | | | 1.168; | 199-201; | |
| | | | 814-826, | PKC_PHOSPHO_SITE | |
| | | | 1.091; | 215-217; | |
| | | | 112-118, | ASN_GLYCOSYLATION | |
| | | | 1.074; | 6-9; MYRISTYL | |
| | | | 38-48, 1.162; | 602-607; | |
| | | | 683-692, | PKC_PHOSPHO_SITE | |
| | | | 1.149; | 68-70; | |
| | | | 70-78, 1.134; | CK2_PHOSPHO_SITE | |
| | | | 187-213, | 452-455; | |
| | | | 1.102; | CK2_PHOSPHO_SITE | |
| | | | 132-141, | 97-100; MYRISTYL | |
| | | | 1.138; | 700-705; | |
| | | | 148-158, 1.18; | ASN_GLYCOSYLATION | |
| | | | 461-517, | 145-148; | |
| | | | 1.189; | PKC_PHOSPHO_SITE | |
| | | | 262-268, | 187-189; | |
| | | | 1.069; | AMIDATION 596-599; | |
| | | | 775-795, | ASN_GLYCOSYLATION | |
| | | | 1.226; | 132-135; | |
| | | | 416-423, | PKC_PHOSPHO_SITE | |
| | | | 1.095; | 731-733; | |
| | | | 876-896, | PKC_PHOSPHO_SITE | |
| | | | 1.225; | 949-951; | |
| | | | 254-260, | ASN_GLYCOSYLATION | |
| | | | 1.073; | 157-160; | |
| | | | 227-235, | CK2_PHOSPHO_SITE | |
| | | | 1.112; | 809-812; | |
| | | | 347-359, | CK2_PHOSPHO_SITE | |
| | | | 1.087; | 872-875; | |
| | | | 708-732, 1.23; | PKC_PHOSPHO_SITE | |
| | | | 4-21, 1.131; | 347-349; | |
| | | | 59-64, 1.053; | CK2_PHOSPHO_SITE | |
| | | | 797-808, | 162-165; | |
| | | | 1.245; | CK2_PHOSPHO_SITE | |
| | | | 280-307, 1.16; | 78-81; | |
| | | | 336-344, | ASN_GLYCOSYLATION | |
| | | | 1.119; | 641-644; | |
| | | | 855-869, | PKC_PHOSPHO_SITE | |
| | | | 1.185; | 443-445; | |
| | | | 406-413, | PKC_PHOSPHO_SITE | |
| | | | 1.053; | 229-231; | |
| | | | 629-640, | PKC_PHOSPHO_SITE | |
| | | | 1.181; | 674-676; MYRISTYL | |
| | | | 744-749, 1.03; | 241-246; | |
| | | | 427-438, 1.13; | CK2_PHOSPHO_SITE | |
| | | | 700-705, | 394-397; | |
| | | | 1.057; | CK2_PHOSPHO_SITE | |
| | | | 244-250, | 272-275; | |
| | | | 1.101; | PKC_PHOSPHO_SITE | |
| | | | 751-761, | 351-353; | |
| | | | 1.116; | PKC_PHOSPHO_SITE | |
| | | | | 414-416; | |
| | | | | TYR_PHOSPHO_SITE | |
| | | | | 231-238; | |
| | | | | PKC_PHOSPHO_SITE | |
| | | | | 398-400; | |
| | | | | CK2_PHOSPHO_SITE | |
| | | | | 706-709; | |
| DEX0477_030.aa.1 | Y | 0 - o1-282; | 217-224, 1.16; | ASN_GLYCOSYLATION | Tryp_SPc 53-275; |
| | | | 74-107, 1.151; | 213-216; | trypsin 54-275; |
| | | | 184-204, | ASN_GLYCOSYLATION | CHYMOTRYPSIN 228-240; |
| | | | 1.123; | 197-200; | TRYPSIN_DOM |
| | | | 237-248, | PKC_PHOSPHO_SITE | 47-280; |
| | | | 1.157; | 164-166; MYRISTYL | CHYMOTRYPSIN 80-95; |
| | | | 57-72, 1.086; | 252-257; MYRISTYL | TRYPSIN_SER 229-240; |
| | | | 253-259, | 46-51; MYRISTYL | TRYPSIN_HIS |
| | | | 1.069; | 16-21; | 90-95; CHYMOTRYPSIN |
| | | | 261-275, | PKC_PHOSPHO_SITE | 138-152; |
| | | | 1.158; | 13-15; | |
| | | | 143-178, | CK2_PHOSPHO_SITE | |
| | | | 1.122; | 222-225; | |
| | | | 27-50, 1.188; | PKC_PHOSPHO_SITE | |
| | | | | 192-194; | |
| | | | | CK2_PHOSPHO_SITE | |
| | | | | 120-123; MYRISTYL | |
| | | | | 226-231; | |
| | | | | ASN_GLYCOSYLATION | |
| | | | | 242-245; | |
| | | | | PKC_PHOSPHO_SITE | |
| | | | | 278-280; MYRISTYL | |
| | | | | 114-119; | |
| | | | | PKC_PHOSPHO_SITE | |
| | | | | 259-261; | |
| | | | | ASN_GLYCOSYLATION | |
| | | | | 131-134; | |
| | | | | CK2_PHOSPHO_SITE | |
| | | | | 199-202; | |
| DEX0477_030.aa.2 | N | 0 - o1-221; | 123-143, | CK2_PHOSPHO_SITE | TRYPSIN_DOM 28-219; |
| | | | 1.123; | 59-62; | trypsin 7-214; |
| | | | 200-214, | PKC_PHOSPHO_SITE | TRYPSIN_SER 168-179; |
| | | | 1.158; | 103-105; MYRISTYL | CHYMOTRYPSIN |
| | | | 176-187, | 165-170; | 77-91; CHYMOTRYPSIN |
| | | | 1.157; | ASN_GLYCOSYLATION | 167-179; Tryp_SPc |
| | | | 156-163, 1.16; | 152-155; MYRISTYL | 7-214; |
| | | | 6-26, 1.106; | 191-196; | |
| | | | 192-198, | ASN_GLYCOSYLATION | |
| | | | 1.069; | 70-73; | |
| | | | 28-46, 1.172; | PKC_PHOSPHO_SITE | |
| | | | 82-117, 1.122; | 217-219; | |
| | | | | PKC_PHOSPHO_SITE | |
| | | | | 131-133; | |
| | | | | PKC_PHOSPHO_SITE | |
| | | | | 198-200; | |
| | | | | ASN_GLYCOSYLATION | |
| | | | | 136-139; | |
| | | | | CK2_PHOSPHO_SITE | |
| | | | | 138-141; MYRISTYL | |
| | | | | 53-58; | |
| | | | | PKC_PHOSPHO_SITE | |
| | | | | 11-13; | |
| | | | | CK2_PHOSPHO_SITE | |
| | | | | 161-164; | |
| | | | | ASN_GLYCOSYLATION | |
| | | | | 181-184; | |
| DEX0477_030.aa.3 | N | 0 - o1-34; | 13-27, 1.158; | PKC_PHOSPHO_SITE | |
| | | | | 30-32; | |
| | | | | PKC_PHOSPHO_SITE | |
| | | | | 10-12; | |
| DEX0477_030.orf.3 | N | 0 - o1-58; | | MYRISTYL 25-30; | PRENYLATION 55-58; |
| | | | | PKC_PHOSPHO_SITE | |
| | | | | 11-13; | |
| DEX0477_031.aa.1 | Y | 1 - o1-12; | 130-137, 1.27; | PKC_PHOSPHO_SITE | |
| | | tm13-31; | 97-110, 1.043; | 91-93; MYRISTYL | |
| | | i32-140; | 16-63, 1.196; | 131-136; | |
| | | | 84-91, 1.086; | PKC_PHOSPHO_SITE | |
| | | | 65-82, 1.115; | 33-35; MYRISTYL | |
| | | | 115-124, | 76-81; | |
| | | | 1.212; | | |
| DEX0477_031.orf.1 | N | 0 - o1-151; | 77-90, 1.196; | CK2_PHOSPHO_SITE | CYS_RICH 86-125; |
| | | | 4-32, 1.159; | 107-110; | |
| | | | 95-108, 1.331; | PKC_PHOSPHO_SITE | |
| | | | 142-148, | 75-77; | |
| | | | 1.129; | ASN_GLYCOSYLATION | |
| | | | 63-69, 1.048; | 109-112; | |
| | | | 35-53, 1.086; | CK2_PHOSPHO_SITE | |
| | | | 111-137, | 126-129; | |
| | | | 1.191; | PKC_PHOSPHO_SITE | |
| | | | | 44-46; MYRISTYL | |
| | | | | 54-59; | |
| | | | | PKC_PHOSPHO_SITE | |
| | | | | 59-61; | |
| | | | | MICROBODIES_CTER | |
| | | | | 149-151; | |
| DEX0477_032.aa.1 | N | 0 - o1-402; | 186-192, | CK2_PHOSPHO_SITE | dynamin_2 66-295; |
| | | | 1.086; | 13-16; | GED 309-400; GED |
| | | | 195-208, | PKC_PHOSPHO_SITE | 309-400; |
| | | | 1.082; | 241-243; | |
| | | | 366-372, | CAMP_PHOSPHO_SITE | |
| | | | 1.058; | 10-13; AMIDATION | |
| | | | 260-285, | 8-11; | |
| | | | 1.176; | PKC_PHOSPHO_SITE | |
| | | | 331-362, | 329-331; | |
| | | | 1.127; | CK2_PHOSPHO_SITE | |
| | | | 113-119, | 312-315; | |
| | | | 1.076; | CK2_PHOSPHO_SITE | |
| | | | 99-105, 1.068; | 308-311; | |
| | | | 210-230, | LEUCINE_ZIPPER | |
| | | | 1.103; | 338-359; | |
| | | | 318-327, | PKC_PHOSPHO_SITE | |
| | | | 1.075; | 170-172; | |
| | | | 165-173, | CAMP_PHOSPHO_SITE | |
| | | | 173, 1.055; | 330-333; | |
| | | | 19-34, 1.159; | CK2_PHOSPHO_SITE | |
| | | | 57-84, 1.145; | 135-138; | |
| | | | 384-391, | PKC_PHOSPHO_SITE | |
| | | | 1.061; | 228-230; MYRISTYL | |
| | | | 42-52, 1.113; | 302-307; | |
| | | | | CK2_PHOSPHO_SITE | |
| | | | | 313-316; | |
| | | | | CK2_PHOSPHO_SITE | |
| | | | | 244-247; | |
| | | | | CAMP_PHOSPHO_SITE | |
| | | | | 295-298; | |
| | | | | CK2_PHOSPHO_SITE | |
| | | | | 156-159; | |
| | | | | CK2_PHOSPHO_SITE | |
| | | | | 215-218; MYRISTYL | |
| | | | | 55-60; | |
| | | | | TYR_PHOSPHO_SITE | |
| | | | | 92-100; | |
| | | | | PKC_PHOSPHO_SITE | |
| | | | | 377-379; | |
| DEX0477_033.aa.1 | N | 0 - o1-155; | 4-26, 1.281; | CAMP_PHOSPHO_SITE | GSHPx 8-85; |
| | | | 103-113, | 132-135; | GLUTPROXDASE 26-42; |
| | | | 1.129; | PKC_PHOSPHO_SITE | GLUTPROXDASE 115-124; |
| | | | 48-57, 1.109; | 50-52; | |
| | | | 62-73, 1.175; | | |
| | | | 77-95, 1.16; | | |
| DEX0477_033.orf.1 | N | 0 - o1-133; | | PKC_PHOSPHO_SITE | GLUTPROXDASE 4-20; |
| | | | | 4-6; | GSHPx 2-63; |
| | | | | CAMP_PHOSPHO_SITE | GLUTPROXDASE 93-102; |
| | | | | 110-133; | |
| | | | | PKC_PHOSPHO_SITE | |
| | | | | 28-30; | |
| DEX0477_033.aa.2 | N | 0 - o1-126; | 74-84, 1.129; | CAMP_PHOSPHO_SITE | GSHPx 4-56; |
| | | | 19-28, 1.109; | 103-106; | |
| | | | 48-66, 1.16; | PKC_PHOSPHO_SITE | |
| | | | 33-44, 1.175; | 21-23; | |
| DEX0477_033.aa.3 | N | 0 - o1-150; | 98-108, 1.129; | PKC_PHOSPHO_SITE | GSHPx 9-80; |
| | | | 57-68, 1.175; | 45-47; | |
| | | | 5-35, 1.222; | CAMP_PHOSPHO_SITE | |
| | | | 43-52, 1.109; | 127-130; | |
| | | | 72-90, 1.16; | | |
| DEX0477_034.aa.1 | N | 0 - o1-186; | 123-134, | CK2_PHOSPHO_SITE | NUDIX 97-118; |
| | | | 1.171; | 35-38; | NUDIXFAMILY 92-106; |
| | | | 163-183, | TYR_PHOSPHO_SITE | NUDIXFAMILY 106-121; |
| | | | 1.223; | 111-119; | NUDIX 58-182; |
| | | | 136-147, | PKC_PHOSPHO_SITE | |
| | | | 1.146; | 40-42; | |
| | | | 88-98, 1.114; | CK2_PHOSPHO_SITE | |
| | | | 15-21, 1.061; | 53-56; | |
| | | | 60-83, 1.24; | CAMP_PHOSPHO_SITE | |
| | | | | 50-53; | |
| | | | | PKC_PHOSPHO_SITE | |
| | | | | 53-55; MYRISTYL | |
| | | | | 165-170; | |
| | | | | PKC_PHOSPHO_SITE | |
| | | | | 52-54; MYRISTYL | |
| | | | | 135-140; | |
| | | | | ASN_GLYCOSYLATION | |
| | | | | 138-141; | |
| | | | | PKC_PHOSPHO_SITE | |
| | | | | 48-50; | |
| DEX0477_035.aa.1 | N | 0 - o1-191; | 67-73, 1.119; | MYRISTYL 23-28; | GSTRNSFRASEA 61-77; |
| | | | 26-37, 1.154; | PKC_PHOSPHO_SITE | GST_C 107-168; |
| | | | 80-92, 1.153; | 166-168; MYRISTYL | GSTRNSFRASEP 81-102; |
| | | | 50-61, 1.059; | 150-155; | GSTRNSFRASEA |
| | | | 123-184, | CK2_PHOSPHO_SITE | 169-186; |
| | | | 1.185; | 9-12; | GSTRNSFRASEP 172-191; |
| | | | 41-48, 1.066; | CK2_PHOSPHO_SITE | GST_C 62-169; |
| | | | 12-18, 1.102; | 131-134; | GSTRNSFRASEP 29-45; |
| | | | 98-117, 1.104; | CK2_PHOSPHO_SITE | GST_N 1-69; |
| | | | | 91-94; | |
| | | | | PKC_PHOSPHO_SITE | |
| | | | | 24-26; | |
| | | | | CK2_PHOSPHO_SITE | |
| | | | | 19-22; | |
| | | | | PKC_PHOSPHO_SITE | |
| | | | | 9-11; | |
| DEX0477_035.aa.2 | N | 0 - o1-146; | 50-61; 1.059; | PKC_PHOSPHO_SITE | GSTRNSFRASEP 29-45; |
| | | | 67-73, 1.119; | 9-11; | GST_N 1-69; |
| | | | 98-117, 1.104; | CK2_PHOSPHO_SITE | GSTRNSFRASEP 81-102; |
| | | | 12-18, 1.102; | 91-94; | GST_C 107-146; |
| | | | 26-37, 1.154; | CK2_PHOSPHO_SITE | |
| | | | 41-48, 1.066; | 9-12; | |
| | | | 80-92, 1.153; | PKC_PHOSPHO_SITE | |
| | | | 123-136, | 24-26; | |
| | | | 1.076; | MICROBODIES_CTER | |
| | | | | 144-146; | |
| | | | | PKC_PHOSPHO_SITE | |
| | | | | 139-141; MYRISTYL | |
| | | | | 23-28; | |
| | | | | CK2_PHOSPHO_SITE | |
| | | | | 131-134; | |
| | | | | CK2_PHOSPHO_SITE | |
| | | | | 19-22; | |
| DEX0477_035.orf.2 | N | 1 - i1-6; | | CK2_PHOSPHO_SITE | GSTRNSFRASEP 62-78; |
| | | tm7-25; | | 52-55; | GSTRNSFRASEA 94-110; |
| | | o26-179; | | PKC_PHOSPHO_SITE | GSTRNSFRASEP |
| | | | | 42-44; | 114-135; GST_N 17-89; |
| | | | | MICROBODIES_CTER | GSTRNSFRASEA |
| | | | | 177-179; | 28-42; GST_C 140-179; |
| | | | | AMIDATION 171-174; | GST_N 18-102; |
| | | | | CK2_PHOSPHO_SITE | |
| | | | | 124-127; | |
| | | | | PKC_PHOSPHO_SITE | |
| | | | | 57-59; MYRISTYL | |
| | | | | 56-61; | |
| | | | | PKC_PHOSPHO_SITE | |
| | | | | 172-174; | |
| | | | | CK2_PHOSPHO_SITE | |
| | | | | 42-45; | |
| | | | | TYR_PHOSPHO_SITE | |
| | | | | 169-175; | |
| | | | | CK2_PHOSPHO_SITE | |
| | | | | 164-167; | |
| | | | | PKC_PHOSPHO_SITE | |
| | | | | 4-6; | |
| DEX0477_035.aa.3 | N | 0 - o1-191; | 123-184, | MYRISTYL 23-28; | GSTRNSFRASEA 61-77; |
| | | | 1.185; | PKC_PHOSPHO_SITE | GSTRNSFRASEP 81-102; |
| | | | 41-48, 1.066; | 9-11; | GST_C 107-168; |
| | | | 12-18, 1.102; | CK2_PHOSPHO_SITE | GST_C 62-169; |
| | | | 80-92, 1.153; | 91-94; | GSTRNSFRASEP 172-191; |
| | | | 67-73, 1.119; | PKC_PHOSPHO_SITE | GST_N 1-69; |
| | | | 50-61, 1.059; | 166-168; | GSTRNSFRASEP 29-45; |
| | | | 98-117, 1.104; | CK2_PHOSPHO_SITE | GSTRNSFRASEA 169-186; |
| | | | 26-37, 1.154; | 9-12; | |
| | | | | CK2_PHOSPHO_SITE | |
| | | | | 19-22; | |
| | | | | PKC_PHOSPHO_SITE | |
| | | | | 24-26; MYRISTYL | |
| | | | | 150-155; | |
| | | | | CK2_PHOSPHO_SITE | |
| | | | | 131-134; | |
| DEX0477_035.orf.3 | Y | 1 - o1-14; | 71-82, 1.154; | CK2_PHOSPHO_SITE | GSTRNSFRASEP 217-236; |
| | | tm15-37; | 57-63, 1.102; | 64-67; | GST_C 107-214; |
| | | i38-236; | 112-118, | PKC_PHOSPHO_SITE | GSTRNSFRASEP 126-147; |
| | | | 1.119; 7-18, | 69-71; MYRISTYL | GST_N 29-101; |
| | | | 1.117; | 1-6; | GSTRNSFRASEA 106-122; |
| | | | 143-162, | PKC_PHOSPHO_SITE | GSTRNSFRASEA |
| | | | 1.104; | 211-213; | 214-231; GST_N 30-114; |
| | | | 125-137, | ASN_GLYCOSYLATION | GSTRNSFRASEP |
| | | | 1.153; | 20-23; MYRISTYL | 74-90; GST_C 152-213; |
| | | | 95-106, | 195-200; | GSTRNSFRASEA |
| | | | 1.059; | PKC_PHOSPHO_SITE | 40-54; |
| | | | 20-27, 1.038; | 54-56; MYRISTYL | |
| | | | 29-51, 1.196; | 68-73; | |
| | | | 86-93, 1.066; | CK2_PHOSPHO_SITE | |
| | | | 168-229, | 54-57; | |
| | | | 1.185; | CK2_PHOSPHO_SITE | |
| | | | | 176-179; | |
| | | | | CK2_PHOSPHO_SITE | |
| | | | | 136-139; | |
| DEX0477_035.aa.4 | Y | 0 - o1-291; | 221-240, | CK2_PHOSPHO_SITE | GST_N 107-179; |
| | | | 1.104; | 142-145; | GSTRNSFRASEP 152-168; |
| | | | 50-88, 1.159; | PKC_PHOSPHO_SITE | GST_N 105-192; |
| | | | 110-118, | 11-13; | GST_C 230-291; |
| | | | 1.036; | PKC_PHOSPHO_SITE | GSTRNSFRASEP 204-225; |
| | | | 203-215, | 147-149; | GST_C 185-284; |
| | | | 1.153; | CK2_PHOSPHO_SITE | |
| | | | 190-196, | 214-217; | |
| | | | 1.119; | PKC_PHOSPHO_SITE | |
| | | | 123-129, | 132-134; MYRISTYL | |
| | | | 1.048; | 146-151; MYRISTYL | |
| | | | 99-108, 1.129; | 87-92; MYRISTYL | |
| | | | 90-96, 1.033; | 6-11; MYRISTYL | |
| | | | 149-160, | 90-95; | |
| | | | 1.154; | CK2_PHOSPHO_SITE | |
| | | | 135-141, | 113-116; | |
| | | | 1.102; | CK2_PHOSPHO_SITE | |
| | | | 246-278, | 254-257; | |
| | | | 1.185; | PKC_PHOSPHO_SITE | |
| | | | 164-171, | 281-283; MYRISTYL | |
| | | | 1.066; | 273-278; | |
| | | | 14-39, 1.252; | CK2_PHOSPHO_SITE | |
| | | | 173-184, | 132-135; | |
| | | | 1.059; | | |
| DEX0477_035.orf.4 | Y | 0 - o1-302; | 105-116, | CK2_PHOSPHO_SITE | GST_C 241-302; |
| | | | 1.166; | 265-268; | GST_N 118-190; |
| | | | 184-195, | PKC_PHOSPHO_SITE | GST_N 119-203; |
| | | | 1.059; | 143-145; | GSTRNSFRASEA 129-143; |
| | | | 61-98, 1.159; | CK2_PHOSPHO_SITE | GSTRNSFRASEP |
| | | | 160-171, | 143-146; MYRISTYL | 215-236; |
| | | | 1.154; | 284-289; | GSTRNSFRASEP 163-179; |
| | | | 175-182, | CK2_PHOSPHO_SITE | GSTRNSFRASEA |
| | | | 1.066; | 153-156; | 195-211; GST_C 196-295; |
| | | | 201-207, | PKC_PHOSPHO_SITE | |
| | | | 1.119; | 292-294; | |
| | | | 257-289, | CK2_PHOSPHO_SITE | |
| | | | 1.185; | 225-228; | |
| | | | 232-251, | PKC_PHOSPHO_SITE | |
| | | | 1.104; | 158-160; MYRISTYL | |
| | | | 118-140, | 157-162; MYRISTYL | |
| | | | 1.196; | 3-8; | |
| | | | 146-152, | PKC_PHOSPHO_SITE | |
| | | | 1.102; | 22-24; MYRISTYL | |
| | | | 25-50, 1.252; | 17-22; MYRISTYL | |
| | | | 214-226, | 98-103; | |
| | | | 1.153; | | |
| DEX0477_035.aa.5 | Y | 0 - o1-226; | 123-129, | MYRISTYL 90-95; | GST_N 105-192; |
| | | | 1.048; | CK2_PHOSPHO_SITE | GSTRNSFRASEP 152-168; |
| | | | 164-171, | 142-145; | GSTRNSFRASEP |
| | | | 1.066; | PKC_PHOSPHO_SITE | 204-225; GST_N 107-179; |
| | | | 149-160, | 11-13; | |
| | | | 1.154; | CK2_PHOSPHO_SITE | |
| | | | 14-39, 1.252; | 113-116; | |
| | | | 173-184, | PKC_PHOSPHO_SITE | |
| | | | 1.059; | 147-149; | |
| | | | 50-88, 1.159; | CK2_PHOSPHO_SITE | |
| | | | 135-141, | 132-135; | |
| | | | 1.102; | PKC_PHOSPHO_SITE | |
| | | | 99-108, 1.129; | 132-134; MYRISTYL | |
| | | | 90-96, 1.033; | 6-11; MYRISTYL | |
| | | | 203-217, | 146-151; MYRISTYL | |
| | | | 1.153; | 87-92; | |
| | | | 110-118, | | |
| | | | 1.036; | | |
| | | | 190-196, | | |
| | | | 1.119; | | |
| DEX0477_035.orf.5 | Y | 0 - o1-237; | 61-98, 1.159 | MYRISTYL 98-103; | GSTRNSFRASEA 195-211; |
| | | | 201-207, | PKC_PHOSPHO_SITE | GSTRNSFRASEP |
| | | | 1.119; | 22-24; MYRISTYL | 163-179; GST_N 119-203; |
| | | | 160-171, | 3-8; MYRISTYL 17-22; | GST_N 118-190; |
| | | | 1.154; | MYRISTYL 157-162; | GSTRNSFRASEA 129-143; |
| | | | 214-228, | CK2_PHOSPHO_SITE | GSTRNSFRASEP |
| | | | 1.153; | 153-156; | 215-236; |
| | | | 146-152, | PKC_PHOSPHO_SITE | |
| | | | 1.102; | 143-145; | |
| | | | 105-116, | PKC_PHOSPHO_SITE | |
| | | | 1.166; | 158-160; | |
| | | | 184-195, | CK2_PHOSPHO_SITE | |
| | | | 1.059; | 143-146; | |
| | | | 175-182, | | |
| | | | 1.066; | | |
| | | | 25-50, 1.252; | | |
| | | | 118-140, | | |
| | | | 1.196; | | |
| DEX0477_036.aa.1 | N | 0 - o1-129; | | ASN_GLYCOSYLATION | |
| | | | | 117-120; MYRISTYL | |
| | | | | 31-36; MYRISTYL | |
| | | | | 63-68; | |
| | | | | CK2_PHOSPHO_SITE | |
| | | | | 119-122; MYRISTYL | |
| | | | | 60-65; MYRISTYL | |
| | | | | 27-32; | |
| | | | | CK2_PHOSPHO_SITE | |
| | | | | 31-34; MYRISTYL | |
| | | | | 7-12; | |
| | | | | ASN_GLYCOSYLATION | |
| | | | | 14-17; MYRISTYL | |
| | | | | 58-63; MYRISTYL | |
| | | | | 26-31; | |
| | | | | CAMP_PHOSPHO_SITE | |
| | | | | 64-67; | |
| | | | | PKC_PHOSPHO_SITE | |
| | | | | 16-18; | |
| | | | | ASN_GLYCOSYLATION | |
| | | | | 69-72; MYRISTYL | |
| | | | | 55-60; MYRISTYL | |
| | | | | 89-94; MYRISTYL | |
| | | | | 79-84; AMIDATION | |
| | | | | 62-65; | |
| DEX0477_036.orf.1 | N | 0 - o1-134; | | MYRISTYL 89-94; | |
| | | | | PKC_PHOSPHO_SITE | |
| | | | | 16-18; MYRISTYL | |
| | | | | 55-60; MYRISTYL | |
| | | | | 31-36; MYRISTYL | |
| | | | | 63-68; MYRISTYL | |
| | | | | 79-84; | |
| | | | | CK2_PHOSPHO_SITE | |
| | | | | 31-34; MYRISTYL | |
| | | | | 7-12; | |
| | | | | ASN_GLYCOSYLATION | |
| | | | | 117-120; MYRISTYL | |
| | | | | 60-65; | |
| | | | | CK2_PHOSPHO_SITE | |
| | | | | 119-122; MYRISTYL | |
| | | | | 26-31; | |
| | | | | ASN_GLYCOSYLATION | |
| | | | | 69-72; | |
| | | | | CAMP_PHOSPHO_SITE | |
| | | | | 64-67; MYRISTYL | |
| | | | | 58-63; AMIDATION | |
| | | | | 62-65; | |
| | | | | ASN_GLYCOSYLATION | |
| | | | | 14-17; MYRISTYL | |
| | | | | 27-32; | |
| DEX0477_037.aa.1 | N | 0 - o1-128; | | CK2_PHOSPHO_SITE | |
| | | | | 42-45; | |
| | | | | PKC_PHOSPHO_SITE | |
| | | | | 18-20; | |
| | | | | CK2_PHOSPHO_SITE | |
| | | | | 18-21; MYRISTYL | |
| | | | | 117-122; MYRISTYL | |
| | | | | 123-128; | |
| | | | | ASN_GLYCOSYLATION | |
| | | | | 31-34; | |
| | | | | CK2_PHOSPHO_SITE | |
| | | | | 58-61; | |
| | | | | PKC_PHOSPHO_SITE | |
| | | | | 42-44; MYRISTYL | |
| | | | | 35-40; MYRISTYL | |
| | | | | 118-123; | |
| | | | | CK2_PHOSPHO_SITE | |
| | | | | 43-46; | |
| | | | | PKC_PHOSPHO_SITE | |
| | | | | 33-35; | |
| | | | | CK2_PHOSPHO_SITE | |
| | | | | 35-38; MYRISTYL | |
| | | | | 121-126; MYRISTYL | |
| | | | | 44-49; | |
| | | | | PKC_PHOSPHO_SITE | |
| | | | | 29-31; MYRISTYL | |
| | | | | 111-116; | |
| | | | | CK2_PHOSPHO_SITE | |
| | | | | 89-92; | |
| | | | | CK2_PHOSPHO_SITE | |
| | | | | 7-10; MYRISTYL | |
| | | | | 119-124; MYRISTYL | |
| | | | | 115-120; | |
| DEX0477_037.orf.1 | N | 0 - o1-120; | | MYRISTYL 25-30; | |
| | | | | MYRISTYL 2-7; | |
| | | | | PKC_PHOSPHO_SITE | |
| | | | | 10-12; MYRISTYL | |
| | | | | 16-21; MYRISTYL | |
| | | | | 99-104; | |
| | | | | CK2_PHOSPHO_SITE | |
| | | | | 24-27; | |
| | | | | ASN_GLYCOSYLATION | |
| | | | | 12-15; | |
| | | | | CK2_PHOSPHO_SITE | |
| | | | | 107-110; MYRISTYL | |
| | | | | 92-97; MYRISTYL | |
| | | | | 107-112; | |
| | | | | PKC_PHOSPHO_SITE | |
| | | | | 14-16; MYRISTYL | |
| | | | | 100-105; | |
| | | | | CK2_PHOSPHO_SITE | |
| | | | | 23-26; | |
| | | | | CK2_PHOSPHO_SITE | |
| | | | | 70-73; MYRISTYL | |
| | | | | 104-109; MYRISTYL | |
| | | | | 96-101; | |
| | | | | CK2_PHOSPHO_SITE | |
| | | | | 16-19; MYRISTYL | |
| | | | | 102-107; | |
| | | | | CK2_PHOSPHO_SITE | |
| | | | | 39-42; MYRISTYL | |
| | | | | 98-103; | |
| | | | | PKC_PHOSPHO_SITE | |
| | | | | 23-25; | |
| | | | | ASN_GLYCOSYLATION | |
| | | | | 109-112; | |
| DEX0477_038.aa.1 | Y | 0 - o1-254; | 4-22, 1.279; | CK2_PHOSPHO_SITE | ASP_RICH 83-139; |
| | | | 197-203, | 248-251; | Osteopontin 1-253; |
| | | | 1.049; | PKC_PHOSPHO_SITE | OSTEOPONTIN 20-30; |
| | | | 142-154, | 171-173; | OSTEO 17-253; |
| | | | 1.182; | AMIDATION 192-195; | |
| | | | 130-136, | MYRISTYL | |
| | | | 1.067; | 207-212; | |
| | | | 51-61, 1.088; | CK2_PHOSPHO_SITE | |
| | | | 161-167, | 223-226; | |
| | | | 1.085; | PKC_PHOSPHO_SITE | |
| | | | 33-43, 1.076; | 245-247; MYRISTYL | |
| | | | 179-185, 1.06; | 12-17; | |
| | | | | ASN_GLYCOSYLATION | |
| | | | | 106-109; RGD 159-161; | |
| | | | | CK2_PHOSPHO_SITE | |
| | | | | 26-29; | |
| | | | | ASN_GLYCOSYLATION | |
| | | | | 79-82; | |
| | | | | CK2_PHOSPHO_SITE | |
| | | | | 62-65; | |
| | | | | PKC_PHOSPHO_SITE | |
| | | | | 49-51; | |
| | | | | CK2_PHOSPHO_SITE | |
| | | | | 235-238; | |
| DEX0477_038.orf.1 | N | 0 - o1-212; | 176-182, | CK2_PHOSPHO_SITE | ASP_RICH 129-185; |
| | | | 1.067; | 108-111; | OSTEOPONTIN 66-76; |
| | | | 188-200, | PKC_PHOSPHO_SITE | Osteopontin 47-212; |
| | | | 1.182; | 46-48; | OSTEO 63-212; |
| | | | 79-89, 1.076; | ASN_GLYCOSYLATION | |
| | | | 97-107, 1.088; | 125-128; MYRISTYL | |
| | | | 48-68, 1.279; | 58-63; | |
| | | | 20-36, 1.118; | PKC_PHOSPHO_SITE | |
| | | | | 11-13; | |
| | | | | PKC_PHOSPHO_SITE | |
| | | | | 95-97; RGD 205-207; | |
| | | | | CK2_PHOSPHO_SITE | |
| | | | | 72-75; | |
| | | | | ASN_GLYCOSYLATION | |
| | | | | 152-155; | |
| DEX0477_038.aa.2 | Y | 0 - o1-240; | 4-22, 1.279; | ASN_GLYCOSYLATION | OSTEOPONTIN 20-30; |
| | | | 183-189, | 92-95; | OSTEO 17-239; |
| | | | 1.049; | CK2_PHOSPHO_SITE | Osteopontin 1-239; |
| | | | 51-61, 1.115; | 234-237; MYRISTYL | ASP_RICH 69-125; |
| | | | 116-122, | 193-198; RGD 145-147; | |
| | | | 1.067; | CK2_PHOSPHO_SITE | |
| | | | 33-43, 1.076; | 209-212; | |
| | | | 147-153, | ASN_GLYCOSYLATION | |
| | | | 1.085; | 65-68; | |
| | | | 165-171, 1.06; | CK2_PHOSPHO_SITE | |
| | | | 128-140, | 26-29; | |
| | | | 1.182; | PKC_PHOSPHO_SITE | |
| | | | | 49-51; | |
| | | | | CK2_PHOSPHO_SITE | |
| | | | | 221-224; | |
| | | | | PKC_PHOSPHO_SITE | |
| | | | | 157-159; | |
| | | | | PKC_PHOSPHO_SITE | |
| | | | | 231-233; | |
| | | | | AMIDATION 178-181; | |
| | | | | MYRISTYL 12-17; | |
| DEX0477_038.orf.2 | N | 0 - o1-198; | 20-36, 1.118; | ASN_GLYCOSYLATION | ASP_RICH 115-171; |
| | | | 97-107, 1.115; | 111-114; RGD 191-193; | Osteopontin 47-198; |
| | | | 79-89, 1.076; | PKC_PHOSPHO_SITE | OSTEO 63-198; |
| | | | 48-68, 1.279; | 46-48; | OSTEOPONTIN 66-76; |
| | | | 174-186, | PKC_PHOSPHO_SITE | |
| | | | 1.182; | 95-97; | |
| | | | 162-168, | CK2_PHOSPHO_SITE | |
| | | | 1.067; | 72-75; | |
| | | | | ASN_GLYCOSYLATION | |
| | | | | 138-141; MYRISTYL | |
| | | | | 58-63; | |
| | | | | PKC_PHOSPHO_SITE | |
| | | | | 11-13; | |
| DEX0477_038.aa.3 | N | 0 - o1-170; | 113-119, | PKC_PHOSPHO_SITE | ASP_RICH 2-55; |
| | | | 1.049; | 87-89; | |
| | | | 46-72, 1.182; | PKC_PHOSPHO_SITE | |
| | | | 77-83, 1.085; | 161-163; | |
| | | | 95-101, 1.06; | AMIDATION 108-111; | |
| | | | | MYRISTYL | |
| | | | | 123-128; | |
| | | | | CK2_PHOSPHO_SITE | |
| | | | | 151-154; | |
| | | | | ASN_GLYCOSYLATION | |
| | | | | 22-25; | |
| | | | | CK2_PHOSPHO_SITE | |
| | | | | 164-167; RGD 75-77; | |
| | | | | CK2_PHOSPHO_SITE | |
| | | | | 139-142; | |
| DEX0477_038.orf.3 | N | 0 - o1-137; | 22-32, 1.088; | PKC_PHOSPHO_SITE | Osteopontin 1-137; |
| | | | 113-125, | 20-22; | OSTEO 2-137; |
| | | | 1.182; | ASN_GLYCOSYLATION | ASP_RICH 54-110; |
| | | | 101-107, | 77-80; | |
| | | | 1.067; 4-19, | ASN_GLYCOSYLATION | |
| | | | 1.144; | 50-53; | |
| | | | | CK2_PHOSPHO_SITE | |
| | | | | 33-36; RGD 130-132; | |
| DEX0477_039.aa.1 | N | 0 - o1-156; | 26-51, 1.152; | MYRISTYL 77-82; | |
| | | | 107-131, | MYRISTYL 16-21; | |
| | | | 1.156; 4-16, | MYRISTYL 137-142; | |
| | | | 1.087; 79-104, | MYRISTYL 151-156; | |
| | | | 1.216; | MYRISTYL 19-24; | |
| | | | 136-149, | PKC_PHOSPHO_SITE | |
| | | | 1.116; | 154-156; RGD 22-24; | |
| | | | 61-77, 1.201; | MYRISTYL 40-45; | |
| | | | | PKC_PHOSPHO_SITE | |
| | | | | 61-63; | |
| | | | | PKC_PHOSPHO_SITE | |
| | | | | 20-22; | |
| DEX0477_039.orf.1 | N | 0 - o1-195; | 120-137, | PKC_PHOSPHO_SITE | |
| | | | 1.115; | 146-148; | |
| | | | 139-146, | PKC_PHOSPHO_SITE | |
| | | | 1.086; 4-30, | 88-90; MYRISTYL | |
| | | | 1.204; 43-59, | 59-64; | |
| | | | 1.201; | PKC_PHOSPHO_SITE | |
| | | | 185-192, 1.27; | 29-31; MYRISTYL | |
| | | | 61-118, 1.196; | 131-136; | |
| | | | 170-179, | PKC_PHOSPHO_SITE | |
| | | | 1.212; | 43-45; MYRISTYL | |
| | | | 152-165, | 186-191; | |
| | | | 1.043; | | |
| DEX0477_040.aa.1 | N | 0 - o1-376; | 19-25, 1.105; | MYRISTYL 29-34; | ENOLASE 164-177; |
| | | | 62-69, 1.104; | MYRISTYL 155-160; | enolase_N 2-134; |
| | | | 185-195, | MYRISTYL 113-118; | sp_P06733_ENOA_HUMAN |
| | | | 1.084; | MYRISTYL 362-367; | 3-331; ENOLASE |
| | | | 310-320, | PKC_PHOSPHO_SITE | 35-49; ENOLASE 107-123; |
| | | | 1.126; | 26-28; | ENOLASE 317-328; |
| | | | 367-373, | PKC_PHOSPHO_SITE | enolase 142-373; |
| | | | 1.053; | 254-256; | |
| | | | 269-293, | TYR_PHOSPHO_SITE | |
| | | | 1.146; | 262-270; | |
| | | | 334-344, | CK2_PHOSPHO_SITE | |
| | | | 1.156; | 263-266; | |
| | | | 224-230, | ASN_GLYCOSYLATION | |
| | | | 1.072; | 102-105; | |
| | | | 168-176, | ASN_GLYCOSYLATION | |
| | | | 1.122; | 70-73; MYRISTYL | |
| | | | 140-152, | 243-248; | |
| | | | 1.194; | ASN_GLYCOSYLATION | |
| | | | 41-48, 1.083; | 83-86; MYRISTYL | |
| | | | 30-38, 1.113; | 160-165; | |
| | | | 4-10, 1.095; | TYR_PHOSPHO_SITE | |
| | | | 109-137, | 50-57; | |
| | | | 1.205; | CK2_PHOSPHO_SITE | |
| | | | 354-360, | 291-294; | |
| | | | 1.106; | PKC_PHOSPHO_SITE | |
| | | | 74-85, 1.141; | 237-239; MYRISTYL | |
| | | | 237-250, | 42-47; MYRISTYL | |
| | | | 1.124; | 61-66; | |
| | | | | CK2_PHOSPHO_SITE | |
| | | | | 344-347; MYRISTYL | |
| | | | | 156-161; MYRISTYL | |
| | | | | 38-43; | |
| | | | | PKC_PHOSPHO_SITE | |
| | | | | 79-81; | |
| | | | | CK2_PHOSPHO_SITE | |
| | | | | 85-88; | |
| DEX0477_040.aa.2 | N | 0 - o1-404; | 269-293, | PKC_PHOSPHO_SITE | ENOLASE 35-49; |
| | | | 1.146; | 237-239; MYRISTYL | enolase_N 2-134; |
| | | | 140-152, | 160-165; | ENOLASE 317-328; |
| | | | 1.194; | PKC_PHOSPHO_SITE | ENOLASE 164-177; |
| | | | 350-370, | 79-81; | ENOLASE 107-123; |
| | | | 1.146; | CK2_PHOSPHO_SITE | enolase 142-404; |
| | | | 310-320, | 344-347; MYRISTYL | sp_P06733_ENOA_HUMAN |
| | | | 1.126; | 38-43; MYRISTYL | 3-331; |
| | | | 334-344, | 243-248; MYRISTYL | |
| | | | 1.156; | 156-161; | |
| | | | 237-250, | ASN_GLYCOSYLATION | |
| | | | 1.124; | 83-86; MYRISTYL | |
| | | | 185-195, | 61-66; MYRISTYL | |
| | | | 1.084; | 155-160; | |
| | | | 62-69, 1.104; | PKC_PHOSPHO_SITE | |
| | | | 19-25, 1.105; | 26-28; MYRISTYL | |
| | | | 30-38, 1.113; | 113-118; MYRISTYL | |
| | | | 109-137, | 29-34; | |
| | | | 1.205; 4-10, | ASN_GLYCOSYLATION | |
| | | | 1.095; | 102-105; MYRISTYL | |
| | | | 224-230, | 377-382; | |
| | | | 1.072; | CK2_PHOSPHO_SITE | |
| | | | 41-48, 1.083; | 85-88; | |
| | | | 168-176, | ASN_GLYCOSYLATION | |
| | | | 1.122; | 70-73; | |
| | | | 74-85, 1.141; | TYR_PHOSPHO_SITE | |
| | | | 372-401, 1.17; | 262-270; | |
| | | | | CK2_PHOSPHO_SITE | |
| | | | | 263-266; | |
| | | | | CK2_PHOSPHO_SITE | |
| | | | | 291-294; MYRISTYL | |
| | | | | 42-47; | |
| | | | | PKC_PHOSPHO_SITE | |
| | | | | 254-256; | |
| | | | | CK2_PHOSPHO_SITE | |
| | | | | 368-371; | |
| | | | | TYR_PHOSPHO_SITE | |
| | | | | 50-57; | |
| DEX0477_041.aa.1 | N | 1 - i1-90; | 89-99, 1.193; | PKC_PHOSPHO_SITE | BAF 1-69; |
| | | tm91-110; | 103-110, | 4-6; MYRISTYL 21-26; | sp_O75531_BAF_HUMAN |
| | | o111-113; | 1.208; | ASN_GLYCOSYLATION | 1-43; |
| | | | 56-61, 1.06; | 99-102; | |
| | | | 76-82, 1.084; | CK2_PHOSPHO_SITE | |
| | | | 8-13, 1.045; | 109-112; | |
| | | | 20-32, 1.087; | AMIDATION 30-33; | |
| | | | 43-53, 1.238; | MYRISTYL 100-105; | |
| | | | | PKC_PHOSPHO_SITE | |
| | | | | 66-68; | |
| DEX0477_042.aa.1 | N | 0 - i1-30; | 6-12, 1.075; | MYRISTYL 3-8; | |
| | | | 16-25, 1.086; | | |
| DEX0477_042.orf.1 | Y | 0 - o1-66; | | PKC_PHOSPHO_SITE | |
| | | | | 41-43; | |
| | | | | PKC_PHOSPHO_SITE | |
| | | | | 50-52; | |
| | | | | PKC_PHOSPHO_SITE | |
| | | | | 37-39; | |
| | | | | PKC_PHOSPHO_SITE | |
| | | | | 44-46; | |
| DEX0477_043.aa.1 | N | 0 - o1-249; | 178-186, | PKC_PHOSPHO_SITE | TYPE1KERATIN 183-206; |
| | | | 1.098; | 39-41; MYRISTYL | TYPE1KERATIN |
| | | | 143-150, | 82-87; MYRISTYL | 162-175; GLY_RICH |
| | | | 1.085; | 47-52; MYRISTYL | 16-83; filament 83-236; |
| | | | 152-167, | 33-38; MYRISTYL | SER_RICH 10-72; |
| | | | 1.094; | 70-75; | |
| | | | 94-105, 1.095; | CK2_PHOSPHO_SITE | |
| | | | 53-63, 1.123; | 97-100; MYRISTYL | |
| | | | 37-43, 1.071; | 189-194; MYRISTYL | |
| | | | 26-34, 1.078; | 21-26; MYRISTYL | |
| | | | 128-138, | 54-59; MYRISTYL | |
| | | | 1.042; | 67-72; MYRISTYL | |
| | | | 73-83, 1.08; | 223-228; | |
| | | | 7-15, 1.029; | CK2_PHOSPHO_SITE | |
| | | | 111-117, | 212-215; MYRISTYL | |
| | | | 1.047; | 74-79; | |
| | | | | PKC_PHOSPHO_SITE | |
| | | | | 227-229; MYRISTYL | |
| | | | | 231-236; | |
| | | | | PKC_PHOSPHO_SITE | |
| | | | | 24-26; MYRISTYL | |
| | | | | 178-183; MYRISTYL | |
| | | | | 36-41; MYRISTYL | |
| | | | | 43-48; | |
| | | | | PKC_PHOSPHO_SITE | |
| | | | | 28-30; | |
| | | | | CK2_PHOSPHO_SITE | |
| | | | | 110-113; MYRISTYL | |
| | | | | 19-24; MYRISTYL | |
| | | | | 23-28; | |
| | | | | PKC_PHOSPHO_SITE | |
| | | | | 13-15; MYRISTYL | |
| | | | | 78-83; MYRISTYL | |
| | | | | 232-237; MYRISTYL | |
| | | | | 49-54; MYRISTYL | |
| | | | | 64-69; | |
| | | | | PKC_PHOSPHO_SITE | |
| | | | | 4-6; MYRISTYL 66-71; | |
| | | | | MYRISTYL 46-51; | |
| | | | | MYRISTYL 34-39; | |
| | | | | CK2_PHOSPHO_SITE | |
| | | | | 171-174; | |
| | | | | CK2_PHOSPHO_SITE | |
| | | | | 137-140; MYRISTYL | |
| | | | | 242-247; | |
| DEX0477_043.orf.1 | Y | 0 - o1-247; | | MYRISTYL 66-71; | filament 106-236; |
| | | | | MYRISTYL 42-47; | SER_RICH 33-95; |
| | | | | MYRISTYL 87-92; | GLY_RICH 39-106; |
| | | | | MYRISTYL 56-61; | TYPE1KERATIN 206-229; |
| | | | | MYRISTYL 93-98; | TYPE1KERATIN |
| | | | | CK2_PHOSPHO_SITE | 185-198; |
| | | | | 120-123; | |
| | | | | PKC_PHOSPHO_SITE | |
| | | | | 47-49; MYRISTYL | |
| | | | | 57-62; | |
| | | | | PKC_PHOSPHO_SITE | |
| | | | | 51-53; MYRISTYL | |
| | | | | 90-95; MYRISTYL | |
| | | | | 44-49; MYRISTYL | |
| | | | | 59-64; | |
| | | | | PKC_PHOSPHO_SITE | |
| | | | | 62-64; AMIDATION | |
| | | | | 240-243; MYRISTYL | |
| | | | | 89-94; MYRISTYL | |
| | | | | 46-51; MYRISTYL | |
| | | | | 97-102; | |
| | | | | CK2_PHOSPHO_SITE | |
| | | | | 133-136; MYRISTYL | |
| | | | | 77-82; | |
| | | | | PKC_PHOSPHO_SITE | |
| | | | | 36-38; MYRISTYL | |
| | | | | 201-206; MYRISTYL | |
| | | | | 221-226; | |
| | | | | CK2_PHOSPHO_SITE | |
| | | | | 221-224; MYRISTYL | |
| | | | | 69-74; MYRISTYL | |
| | | | | 105-110; MYRISTYL | |
| | | | | 212-217; MYRISTYL | |
| | | | | 237-242; | |
| | | | | CK2_PHOSPHO_SITE | |
| | | | | 194-197; MYRISTYL | |
| | | | | 70-75; | |
| | | | | PKC_PHOSPHO_SITE | |
| | | | | 27-29; MYRISTYL | |
| | | | | 101-106; MYRISTYL | |
| | | | | 72-77; | |
| | | | | CK2_PHOSPHO_SITE | |
| | | | | 160-163; | |
| DEX0477_044.aa.1 | Y | 3 - i1-11; | 13-78, 1.204; | MYRISTYL 29-34; | TM4_2 1-110; TMFOUR |
| | | tm12-34; | 130-153, | MYRISTYL 74-79; | 80-108; TMFOUR 53-79; |
| | | o35-53; | 1.104; | PKC_PHOSPHO_SITE | TMFOUR 9-32; |
| | | tm54-76; | 81-113, 1.241; | 150-152; | transmembrane4 6-137; |
| | | i77-88; | | | |
| | | tm89-111; | | | |
| | | o112-156; | | | |
| DEX0477_044.aa.2 | Y | 4 - o1-3; | 50-56, 1.068; | ASN_GLYCOSYLATION | transmembrane4 1-280; |
| | | tm4-26; | 145-181, | 238-241; MYRISTYL | TM4_2 104-295; |
| | | i27-64; | 1.221; | 270-275; MYRISTYL | |
| | | tm65-87; | 62-69, 1.075; | 24-29; MYRISTYL | |
| | | o88-101; | 4-28, 1.204; | 71-76; | |
| | | tm102-124; | 224-231, | PKC_PHOSPHO_SITE | |
| | | i125-268; | 1.171; | 197-199; MYRISTYL | |
| | | tm269-291; | 90-128, 1.241; | 86-91; | |
| | | o292-295; | 264-276, | ASN_GLYCOSYLATION | |
| | | | 1.124; | 232-235; | |
| | | | 31-47, 1.259; | CK2_PHOSPHO_SITE | |
| | | | 200-207, | 210-213; | |
| | | | 1.125; | CK2_PHOSPHO_SITE | |
| | | | 248-261, | 166-169; MYRISTYL | |
| | | | 1.136; | 82-87; MYRISTYL | |
| | | | 71-78, | 200-205; MYRISTYL | |
| | | | 1.109; | 80-85; | |
| | | | 278-292, | CK2_PHOSPHO_SITE | |
| | | | 1.172; | 186-189; | |
| | | | | ASN_GLYCOSYLATION | |
| | | | | 195-198; | |
| | | | | ASN_GLYCOSYLATION | |
| | | | | 208-211; MYRISTYL | |
| | | | | 271-276; | |
| | | | | CK2_PHOSPHO_SITE | |
| | | | | 236-239; | |
| | | | | CK2_PHOSPHO_SITE | |
| | | | | 38-41; MYRISTYL | |
| | | | | 278-283; | |
| DEX0477_044.orf.2 | Y | 4 - i1-6; | 4-64, 1.204; | MYRISTYL 15-20; | TM4_2 1-72; |
| | | tm7-29; | 86-92, 1.068; | MYRISTYL 116-121; | |
| | | o30-38; | 107-114, | MYRISTYL 60-65; | |
| | | tm39-61; | 1.109; | MYRISTYL 122-127; | |
| | | i62-100; | 181-204, | MYRISTYL 107-112; | |
| | | tm101-123; | 1.104; | PKC_PHOSPHO_SITE | |
| | | o124-137; | 67-83, 1.259; | 201-203; | |
| | | tm138-160; | 126-164, | CK2_PHOSPHO_SITE | |
| | | i161-207; | 1.241; | 74-77; MYRISTYL | |
| | | | 98-105, 1.075; | 118-123; | |
| DEX0477_044.aa.3 | N | 1 - i1-83; | 63-76, 1.136; | ASN_GLYCOSYLATION | TM4_2 16-110; |
| | | tm84-106; | 93-107, 1.172; | 23-26; MYRISTYL | |
| | | o107-110; | 79-91, 1.124; | 85-90; MYRISTYL | |
| | | | 39-46, 1.171; | 86-91; | |
| | | | 15-22, 1.151; | CK2_PHOSPHO_SITE | |
| | | | | 25-28; | |
| | | | | CK2_PHOSPHO_SITE | |
| | | | | 51-54; MYRISTYL | |
| | | | | 93-98; | |
| | | | | ASN_GLYCOSYLATION | |
| | | | | 53-56; MYRISTYL | |
| | | | | 15-20; | |
| | | | | ASN_GLYCOSYLATION | |
| | | | | 47-50; | |
| DEX0477_044.orf.3 | N | 1 - i1-83; | | MYRISTYL 86-91; | TM4_2 16-110; |
| | | tm84-106; | | MYRISTYL 14-19; | |
| | | o107-110; | | MYRISTYL 85-90; | |
| | | | | MYRISTYL 15-20; | |
| | | | | CAMP_PHOSPHO_SITE | |
| | | | | 11-14; | |
| | | | | CK2_PHOSPHO_SITE | |
| | | | | 25-28; | |
| | | | | ASN_GLYCOSYLATION | |
| | | | | 47-50; MYRISTYL | |
| | | | | 93-98; | |
| | | | | ASN_GLYCOSYLATION | |
| | | | | 53-56; | |
| | | | | ASN_GLYCOSYLATION | |
| | | | | 23-26; | |
| | | | | CK2_PHOSPHO_SITE | |
| | | | | 51-54; | |
| DEX0477_045.aa.1 | Y | 3 - i1-11; | 81-113, 1.241; | MYRISTYL 74-79; | TMFOUR 53-79; |
| | | tm12-34; | 130-153, | MYRISTYL 29-34; | TMFOUR 9-32; |
| | | o35-53; | 1.104; | PKC_PHOSPHO_SITE | transmembrane4 6-137; |
| | | tm54-76; | 13-78, 1.204; | 150-152; | TM4_2 1-110; |
| | | i77-88; | | | TMFOUR 80-108; |
| | | tm89-111; | | | |
| | | o112-156; | | | |
| DEX0477_046.aa.1 | N | 3 - i1-15; | 129-168, | PKC_PHOSPHO_SITE | S5A_REDUCTASE 59-146; |
| | | tm16-35; | 1.168; | 44-46; | Steroid_dh 13-171; |
| | | o36-49; | 85-94, 1.196; | ASN_GLYCOSYLATION | |
| | | tm50-69; | 101-126, 1.14; | 127-130; | |
| | | i70-112; | 14-35, 1.282; | | |
| | | tm113-135; | 65-79, 1.199; | | |
| | | o136-171; | | | |
| DEX0477_047.aa.1 | N | 0 - o1-101; | 51-57, 1.061; | PKC_PHOSPHO_SITE | |
| | | | 18-24, 1.105; | 8-10; MYRISTYL | |
| | | | 28-42, 1.068; | 33-38; | |
| | | | | PKC_PHOSPHO_SITE | |
| | | | | 28-30; AMIDATION | |
| | | | | 90-93; MYRISTYL | |
| | | | | 5-10; | |
| | | | | PKC_PHOSPHO_SITE | |
| | | | | 90-92; AMIDATION | |
| | | | | 83-86; | |
| | | | | CK2_PHOSPHO_SITE | |
| | | | | 78-81; | |
| | | | | CAMP_PHOSPHO_SITE | |
| | | | | 93-96; AMIDATION | |
| | | | | 8-11; | |
| DEX0477_047.orf.1 | N | 0 - o1-120; | 12-35, 1.22; | PKC_PHOSPHO_SITE | |
| | | | 103-113, | 9-11; MYRISTYL | |
| | | | 1.095; | 112-117; | |
| | | | 43-98, 1.124; | PKC_PHOSPHO_SITE | |
| | | | | 73-75; | |
| DEX0477_048.aa.1 | N | 0 - o1-386; | 5-21, 1.18; | PKC_PHOSPHO_SITE | AMINO_ACID_PERMEASE_1 |
| | | | 261-271, | 106-108; | 156-187; |
| | | | 1.153; | ASN_GLYCOSYLATION | PRO_RICH 56-123; |
| | | | 40-57, 1.064; | 359-362; MYRISTYL | |
| | | | 274-280, | 143-148; | |
| | | | 1.092; | PKC_PHOSPHO_SITE | |
| | | | 93-107, 1.119; | 194-196; MYRISTYL | |
| | | | 337-352, | 232-237; | |
| | | | 1.094; | ASN_GLYCOSYLATION | |
| | | | 238-245, | 271-274; MYRISTYL | |
| | | | 1.106; | 270-275; MYRISTYL | |
| | | | 377-383, | 28-33; | |
| | | | 1.087; | CK2_PHOSPHO_SITE | |
| | | | 293-306, | 197-200; | |
| | | | 1.124; | PKC_PHOSPHO_SITE | |
| | | | 70-90, 1.095; | 149-151; | |
| | | | 111-116, | CK2_PHOSPHO_SITE | |
| | | | 1.032; | 306-309; | |
| | | | 156-196, | PKC_PHOSPHO_SITE | |
| | | | 1.258; | 139-141; | |
| | | | 118-134, | PKC_PHOSPHO_SITE | |
| | | | 1.171; | 311-313; | |
| | | | 137-142, | PKC_PHOSPHO_SITE | |
| | | | 1.071; | 60-62; MYRISTYL | |
| | | | 200-232, | 14-19; MYRISTYL | |
| | | | 1.163; | 259-264; | |
| | | | | CAMP_PHOSPHO_SITE | |
| | | | | 62-65; | |
| | | | | PKC_PHOSPHO_SITE | |
| | | | | 34-36; | |
| | | | | CK2_PHOSPHO_SITE | |
| | | | | 21-24; | |
| | | | | CK2_PHOSPHO_SITE | |
| | | | | 69-72; MYRISTYL | |
| | | | | 98-103; | |
| DEX0477_048.aa.3 | N | 0 - o1-296; | 111-116, | ASN_GLYCOSYLATION | PRO_RICH 56-123; |
| | | | 1.032; | 271-274; MYRISTYL | AMINO_ACID_PERMEASE_1 |
| | | | 40-57, 1.064; | 259-264; MYRISTYL | 156-187; |
| | | | 93-107, 1.119; | 14-19; | |
| | | | 261-271, | CK2_PHOSPHO_SITE | |
| | | | 1.153; | 197-200; | |
| | | | 156-196, | PKC_PHOSPHO_SITE | |
| | | | 1.258; | 34-36; | |
| | | | 70-90, 1.095; | PKC_PHOSPHO_SITE | |
| | | | 274-293, | 106-108; | |
| | | | 1.104; | PKC_PHOSPHO_SITE | |
| | | | 200-232, | 60-62; | |
| | | | 1.163; | CK2_PHOSPHO_SITE | |
| | | | 238-245, | 69-72; MYRISTYL | |
| | | | 1.106; 5-21, | 270-275; MYRISTYL | |
| | | | 1.18; 137-142, | 28-33; MYRISTYL | |
| | | | 1.071; | 232-237; | |
| | | | 118-134, | CAMP_PHOSPHO_SITE | |
| | | | 1.171; | 62-65; | |
| | | | | PKC_PHOSPHO_SITE | |
| | | | | 149-151; MYRISTYL | |
| | | | | 143-148; | |
| | | | | PKC_PHOSPHO_SITE | |
| | | | | 194-196; | |
| | | | | CK2_PHOSPHO_SITE | |
| | | | | 21-24; MYRISTYL | |
| | | | | 98-103; | |
| | | | | PKC_PHOSPHO_SITE | |
| | | | | 139-141; | |
| DEX0477_048.aa.4 | N | 0 - o1-338; | 190-197, | MYRISTYL 184-189; | PRO_RICH 56-123; |
| | | | 1.106; | PKC_PHOSPHO_SITE | |
| | | | 40-57, 1.064; | 139-141; | |
| | | | 137-142, | CK2_PHOSPHO_SITE | |
| | | | 1.071; | 21-24; | |
| | | | 70-90, 1.095; | PKC_PHOSPHO_SITE | |
| | | | 118-134, | 60-62; | |
| | | | 1.171; | PKC_PHOSPHO_SITE | |
| | | | 226-232, | 34-36; MYRISTYL | |
| | | | 1.092; | 98-103; MYRISTYL | |
| | | | 245-258, | 143-148; | |
| | | | 1.124; | CK2_PHOSPHO_SITE | |
| | | | 289-304, | 258-261; | |
| | | | 1.094; | PKC_PHOSPHO_SITE | |
| | | | 93-107, 1.119; | 106-108; | |
| | | | 329-335, | CAMP_PHOSPHO_SITE | |
| | | | 1.087; | 62-65; MYRISTYL | |
| | | | 155-184, 1.11; | 28-33; | |
| | | | 5-21, 1.18; | CK2_PHOSPHO_SITE | |
| | | | 213-223, | 69-72; MYRISTYL | |
| | | | 1.153; | 14-19; MYRISTYL | |
| | | | 111-116, | 211-216; | |
| | | | 1.032; | PKC_PHOSPHO_SITE | |
| | | | | 263-265; | |
| | | | | ASN_GLYCOSYLATION | |
| | | | | 223-226; MYRISTYL | |
| | | | | 222-227; | |
| | | | | PKC_PHOSPHO_SITE | |
| | | | | 149-151; | |
| | | | | ASN_GLYCOSYLATION | |
| | | | | 311-314; | |
| DEX0477_049.aa.1 | Y | 1 - i1-6; | 49-81, 1.163; | MYRISTYL 81-86; | AMINO_ACID_PERMEASE_1 |
| | | tm7-29; | 110-120, | PKC_PHOSPHO_SITE | 5-36; |
| | | o30-173; | 1.153; 5-45, | 43-45; AMIDATION | |
| | | | 1.258; | 132-135; | |
| | | | 123-129, | CK2_PHOSPHO_SITE | |
| | | | 1.092; | 46-49; | |
| | | | 136-142, | PKC_PHOSPHO_SITE | |
| | | | 1.105; | 138-140; MYRISTYL | |
| | | | 155-169, | 119-124; MYRISTYL | |
| | | | 1.201; | 108-113; | |
| | | | 87-94, 1.106; | ASN_GLYCOSYLATION | |
| | | | | 120-123; | |
| DEX0477_049.aa.2 | N | 1 - i1-105; | | CK2_PHOSPHO_SITE | CD225 40-122; |
| | | tm106-128; | | 53-56; | |
| | | o129-133; | | ASN_GLYCOSYLATION | |
| | | | | 2-5; | |
| | | | | PKC_PHOSPHO_SITE | |
| | | | | 81-83; MYRISTYL | |
| | | | | 74-79; | |
| | | | | ASN_GLYCOSYLATION | |
| | | | | 75-78; | |
| | | | | LEUCINE_ZIPPER | |
| | | | | 106-127; | |
| | | | | PKC_PHOSPHO_SITE | |
| | | | | 102-104; MYRISTYL | |
| | | | | 114-119; MYRISTYL | |
| | | | | 15-20; | |
| DEX0477_050.aa.1 | N | 0 - o1-332; | 68-74, 1.071; | PKC_PHOSPHO_SITE | SER_RICH 41-103; |
| | | | 245-251, | 59-61; MYRISTYL | TYPE1KERATIN 214-237; |
| | | | 1.062; | 52-57; MYRISTYL | GLY_RICH 47-114; |
| | | | 57-65, 1.078; | 64-69; | filament 114-332; |
| | | | 221-233, | PKC_PHOSPHO_SITE | ATP_GTP_A 283-290; |
| | | | 1.108; | 35-37; MYRISTYL | TYPE1KERATIN |
| | | | 323-329, 1.15; | 101-106; | 193-206; |
| | | | 88-94, 1.123; | PKC_PHOSPHO_SITE | |
| | | | 125-136, | 44-46; | |
| | | | 1.095; | PKC_PHOSPHO_SITE | |
| | | | 209-216, | 267-269; | |
| | | | 1.121; | AMIDATION 304-307; | |
| | | | 41-46, 1.029; | PKC_PHOSPHO_SITE | |
| | | | 16-30, 1.27; | 318-320; MYRISTYL | |
| | | | 161-167, | 113-118; | |
| | | | 1.042; | ASN_GLYCOSYLATION | |
| | | | 184-193, | 14-17; | |
| | | | 1.094; | PKC_PHOSPHO_SITE | |
| | | | 174-180, | 280-282; MYRISTYL | |
| | | | 1.085; | 264-269; | |
| | | | 107-113, 1.08; | ASN_GLYCOSYLATION | |
| | | | | 9-12; MYRISTYL | |
| | | | | 85-90; | |
| | | | | PKC_PHOSPHO_SITE | |
| | | | | 291-293; MYRISTYL | |
| | | | | 105-110; MYRISTYL | |
| | | | | 65-70; | |
| | | | | CAMP_PHOSPHO_SITE | |
| | | | | 300-303; | |
| | | | | PKC_PHOSPHO_SITE | |
| | | | | 268-270; MYRISTYL | |
| | | | | 67-72; | |
| | | | | CK2_PHOSPHO_SITE | |
| | | | | 128-131; MYRISTYL | |
| | | | | 95-100; MYRISTYL | |
| | | | | 74-79; | |
| | | | | CK2_PHOSPHO_SITE | |
| | | | | 318-321; MYRISTYL | |
| | | | | 78-83; | |
| | | | | LEUCINE_ZIPPER | |
| | | | | 221-242; MYRISTYL | |
| | | | | 80-85; | |
| | | | | LEUCINE_ZIPPER | |
| | | | | 228-249; MYRISTYL | |
| | | | | 50-55; | |
| | | | | CK2_PHOSPHO_SITE | |
| | | | | 141-144; | |
| | | | | CAMP_PHOSPHO_SITE | |
| | | | | 299-302; | |
| | | | | CK2_PHOSPHO_SITE | |
| | | | | 263-266; MYRISTYL | |
| | | | | 109-114; | |
| | | | | PKC_PHOSPHO_SITE | |
| | | | | 55-57; | |
| | | | | PKC_PHOSPHO_SITE | |
| | | | | 70-72; | |
| | | | | CK2_PHOSPHO_SITE | |
| | | | | 202-205; MYRISTYL | |
| | | | | 77-82; MYRISTYL | |
| | | | | 54-59; MYRISTYL | |
| | | | | 98-103; | |
| | | | | CK2_PHOSPHO_SITE | |
| | | | | 168-171; MYRISTYL | |
| | | | | 97-102; | |
| DEX0477_050.orf.1 | N | 0 - i1-262; | | CK2_PHOSPHO_SITE | TYPE1KERATIN 211-234; |
| | | | | 138-141; MYRISTYL | SER_RICH 38-100; |
| | | | | 102-107; MYRISTYL | filament 111-256; |
| | | | | 82-87; | GLY_RICH 44-111; |
| | | | | PKC_PHOSPHO_SITE | TYPE1KERATIN |
| | | | | 56-58; MYRISTYL | 190-203; |
| | | | | 77-82; | |
| | | | | CK2_PHOSPHO_SITE | |
| | | | | 125-128; MYRISTYL | |
| | | | | 62-67; MYRISTYL | |
| | | | | 47-52; MYRISTYL | |
| | | | | 110-115; MYRISTYL | |
| | | | | 64-69; | |
| | | | | CK2_PHOSPHO_SITE | |
| | | | | 199-202; MYRISTYL | |
| | | | | 106-111; MYRISTYL | |
| | | | | 75-80; | |
| | | | | PKC_PHOSPHO_SITE | |
| | | | | 32-34; MYRISTYL | |
| | | | | 61-66; | |
| | | | | CK2_PHOSPHO_SITE | |
| | | | | 165-168; MYRISTYL | |
| | | | | 92-97; | |
| | | | | PKC_PHOSPHO_SITE | |
| | | | | 41-43; MYRISTYL | |
| | | | | 95-100; MYRISTYL | |
| | | | | 49-54; MYRISTYL | |
| | | | | 98-103; MYRISTYL | |
| | | | | 71-76; RGD 251-253; | |
| | | | | PKC_PHOSPHO_SITE | |
| | | | | 52-54; MYRISTYL | |
| | | | | 94-99; MYRISTYL | |
| | | | | 74-79; | |
| | | | | PKC_PHOSPHO_SITE | |
| | | | | 67-69; MYRISTYL | |
| | | | | 51-56; | |
| DEX0477_051.aa.1 | N | 0 - o1-190; | 58-64, 1.1; | ASN_GLYCOSYLATION | 1433ZETA 146-175; |
| | | | 131-138, | 117-120; | 14-3-3 1-180; |
| | | | 1.054; | CK2_PHOSPHO_SITE | 14_3_3 1-186; |
| | | | 31-51, 1.154; | 139-142; | 1433ZETA 119-145; |
| | | | 12-24, 1.13; | PKC_PHOSPHO_SITE | 1433ZETA 26-50; |
| | | | 69-77, 1.106; | 154-156; | 1433ZETA 57-79; |
| | | | 88-93, 1.029; | CK2_PHOSPHO_SITE | sp_P31947_143S_HUMAN |
| | | | 111-126, | 149-152; | 25-176; 1433ZETA |
| | | | 1.118; | TYR_PHOSPHO_SITE | 92-118; 1433_2 155-174; |
| | | | 145-153, | 64-72; | |
| | | | 1.065; | CK2_PHOSPHO_SITE | |
| | | | | 128-131; | |
| | | | | CK2_PHOSPHO_SITE | |
| | | | | 100-103; MYRISTYL | |
| | | | | 36-41; | |
| | | | | CK2_PHOSPHO_SITE | |
| | | | | 138-141; | |
| | | | | CK2_PHOSPHO_SITE | |
| | | | | 78-81; MYRISTYL | |
| | | | | 43-48; MYRISTYL | |
| | | | | 113-118; | |
| | | | | CK2_PHOSPHO_SITE | |
| | | | | 154-157; | |
| | | | | PKC_PHOSPHO_SITE | |
| | | | | 100-102; | |
| | | | | PKC_PHOSPHO_SITE | |
| | | | | 88-90; | |
| | | | | ASN_GLYCOSYLATION | |
| | | | | 168-171; | |
| DEX0477_051.orf.1 | N | 0 - o1-174; | 72-77, 1.029; | CK2_PHOSPHO_SITE | 1433ZETA 41-63; |
| | | | 95-110, 1.118; | 84-87; | 1433ZETA 76-102; |
| | | | 42-48, 1.1; | CK2_PHOSPHO_SITE | 1433ZETA 130-159; |
| | | | 53-61, 1.106; | 138-141; | 1433_2 139-158; |
| | | | 4-9, 1.108; | PKC_PHOSPHO_SITE | 14_3_3 1-170; |
| | | | 129-137, | 84-86; MYRISTYL | 1433ZETA 10-34; 14- |
| | | | 1.065; | 27-32; | 3-3 1-164; 1433ZETA |
| | | | 115-122, | ASN_GLYCOSYLATION | 103-129; |
| | | | 1.054; | 101-104; | sp_p31947_143S_HUMAN |
| | | | 15-35, 1.154; | CK2_PHOSPHO_SITE | 9-160; |
| | | | | 122-125; | |
| | | | | CK2_PHOSPHO_SITE | |
| | | | | 123-126; | |
| | | | | ASN_GLYCOSYLATION | |
| | | | | 152-155; MYRISTYL | |
| | | | | 97-102; | |
| | | | | CK2_PHOSPHO_SITE | |
| | | | | 133-136; | |
| | | | | PKC_PHOSPHO_SITE | |
| | | | | 72-74; | |
| | | | | CK2_PHOSPHO_SITE | |
| | | | | 112-115; | |
| | | | | PKC_PHOSPHO_SITE | |
| | | | | 138-140; MYRISTYL | |
| | | | | 20-25; | |
| | | | | CK2_PHOSPHO_SITE | |
| | | | | 62-65; | |
| | | | | TYR_PHOSPHO_SITE | |
| | | | | 48-56; | |
| DEX0477_052.aa.1 | N | 0 - o1-241; | 200-212, | MYRISTYL 183-188; | TRYPSIN_SER 185-196; |
| | | | 1.185; 4-38, | MYRISTYL 43-48; | CHYMOTRYPSIN |
| | | | 1.205; 97-119, | TYR_PHOSPHO_SITE | 90-104; TRYPSIN_DOM |
| | | | 1.171; | 159-166; MYRISTYL | 12-238; |
| | | | 219-238, 1.12; | 182-187; | CHYMOTRYPSIN 184-196; |
| | | | 45-51, 1.065; | PKC_PHOSPHO_SITE | trypsin 41-233; |
| | | | 145-158, | 171-173; | Tryp_SPc 18-233; |
| | | | 1.161; | CAMP_PHOSPHO_SITE | |
| | | | 69-84, 1.142; | 52-55; | |
| | | | 124-131, | PKC_PHOSPHO_SITE | |
| | | | 1.073; | 50-52; MYRISTYL | |
| | | | | 70-75; MYRISTYL | |
| | | | | 140-145; | |
| | | | | PKC_PHOSPHO_SITE | |
| | | | | 157-159; | |
| | | | | PKC_PHOSPHO_SITE | |
| | | | | 66-68; | |
| | | | | PKC_PHOSPHO_SITE | |
| | | | | 109-111; MYRISTYL | |
| | | | | 178-183; | |
| DEX0477_0.52.orf.1 | N | 0 - o1-222; | 78-100, 1.171; | PKC_PHOSPHO_SITE | TRYPSIN_SER 166-177; |
| | | | 181-193, | 90-92; MYRISTYL | TRYPSIN_DOM 1-219; |
| | | | 1.185; | 163-168; | Tryp_SPc 5-214; |
| | | | 50-65, 1.142; | TYR_PHOSPHO_SITE | CHYMOTRYPSIN |
| | | | 105-112, | 140-147; | 165-177; trypsin |
| | | | 1.073; 9-22, | PKC_PHOSPHO_SITE | 22-214; |
| | | | 1.097; | 31-33; MYRISTYL | CHYMOTRYPSIN 71-85; |
| | | | 200-219, 1.12; | 121-126; MYRISTYL | |
| | | | 26-32, 1.065; | 51-56; MYRISTYL | |
| | | | 126-139, | 24-29; MYRISTYL | |
| | | | 1.161; | 164-169; | |
| | | | | CAMP_PHOSPHO_SITE | |
| | | | | 33-36; MYRISTYL | |
| | | | | 159-164; | |
| | | | | PKC_PHOSPHO_SITE | |
| | | | | 152-154; | |
| | | | | PKC_PHOSPHO_SITE | |
| | | | | 138-140; | |
| | | | | PKC_PHOSPHO_SITE | |
| | | | | 47-49; | |
| DEX0477_053.aa.1 | Y | 1 - i1-19; | | MYRISTYL 175-180; | TYPE1KERATIN 144-167; |
| | | tm20-42; | | CK2_PHOSPHO_SITE | filament 44-218; |
| | | o43-218; | | 179-182; | TYPE1KERATIN |
| | | | | CK2_PHOSPHO_SITE | 198-218; |
| | | | | 58-61; | ALPHACATENIN 165-189; |
| | | | | CK2_PHOSPHO_SITE | TYPE1KERATIN |
| | | | | 132-135; MYRISTYL | 123-136; |
| | | | | 195-200; | |
| | | | | PKC_PHOSPHO_SITE | |
| | | | | 210-212; | |
| | | | | CK2_PHOSPHO_SITE | |
| | | | | 71-74; MYRISTYL | |
| | | | | 39-44; | |
| | | | | LEUCINE_ZIPPER | |
| | | | | 151-172; | |
| | | | | CK2_PHOSPHO_SITE | |
| | | | | 98-101; MYRISTYL | |
| | | | | 43-48; MYRISTYL | |
| | | | | 207-212; | |
| DEX0477_053.orf.1 | N | 2 - o1-81; | | PKC_PHOSPHO_SITE | TYPE1KERATIN 209-222; |
| | | tm82-101; | | 300-302; MYRISTYL | TYPE1KERATIN |
| | | i102-105; | | 129-134; | 230-253; filament |
| | | tm106-128; | | CK2_PHOSPHO_SITE | 130-302; |
| | | o129-303; | | 265-268; MYRISTYL | |
| | | | | 296-301; | |
| | | | | ASN_GLYCOSYLATION | |
| | | | | 8-11; MYRISTYL | |
| | | | | 261-266; MYRISTYL | |
| | | | | 84-89; | |
| | | | | CK2_PHOSPHO_SITE | |
| | | | | 184-187; | |
| | | | | AMIDATION 53-56; | |
| | | | | LEUCINE_ZIPPER | |
| | | | | 237-258; MYRISTYL | |
| | | | | 125-130; | |
| | | | | CK2_PHOSPHO_SITE | |
| | | | | 157-160; | |
| | | | | CK2_PHOSPHO_SITE | |
| | | | | 144-147; | |
| | | | | CK2_PHOSPHO_SITE | |
| | | | | 218-221; | |
| DEX0477_054.aa.1 | N | 0 - o1-103; | 53-59, 1.068; | PKC_PHOSPHO_SITE | |
| | | | 15-34, 1.139; | 76-78; | |
| | | | 85-100, 1.108; | PKC_PHOSPHO_SITE | |
| | | | 6-12, 1.086; | 20-22; | |
| DEX0477_054.orf.1 | N | 0 - o1-91; | | MYRISTYL 81-86; | |
| | | | | PKC_PHOSPHO_SITE | |
| | | | | 14-16; MYRISTYL | |
| | | | | 80-85; MYRISTYL | |
| | | | | 86-91; | |
| DEX0477_054.aa.2 | N | 0 - o1-256; | 215-224, | CK2_PHOSPHO_SITE | G3PDPHDRGNASE 14-32; |
| | | | 1.165; | 180-183; | G3PDHDRGNASE 98-115; |
| | | | 38-51, 1.084; | ASN_GLYCOSYLATION | G3PDHDRGNASE |
| | | | 82-91, 1.121; | 107-110; | 138-153; GAPDH 18-25; |
| | | | 139-153, | PKC_PHOSPHO_SITE | gpdh_C 21-182; |
| | | | 1.115; | 52-54; | G3PDHDRGNASE 41-57; |
| | | | 126-133, | CK2_PHOSPHO_SITE | |
| | | | 1.103; | 206-209; | |
| | | | 189-198, | PKC_PHOSPHO_SITE | |
| | | | 1.097; | 114-116; | |
| | | | 11-19, 1.083; | CK2_PHOSPHO_SITE | |
| | | | 71-79, 1.068; | 109-112; MYRISTYL | |
| | | | 100-118, | 37-42; MYRISTYL | |
| | | | 1.174; | 168-173; MYRISTYL | |
| | | | 168-181, | 41-46; | |
| | | | 1.132; | CK2_PHOSPHO_SITE | |
| | | | 21-36, 1.148; | 161-164; MYRISTYL | |
| | | | | 166-171; | |
| | | | | ASN_GLYCOSYLATION | |
| | | | | 71-20; | |
| | | | | PKC_PHOSPHO_SITE | |
| | | | | 189-191; MYRISTYL | |
| | | | | 80-85; | |
| | | | | PKC_PHOSPHO_SITE | |
| | | | | 210-212; MYRISTYL | |
| | | | | 69-74; | |
| | | | | CK2_PHOSPHO_SITE | |
| | | | | 210-213; | |
| | | | | PKC_PHOSPHO_SITE | |
| | | | | 60-62; | |
| | | | | PKC_PHOSPHO_SITE | |
| | | | | 11-13; | |
| DEX0477_054.orf.2 | N | 0 - o1-351; | | MYRISTYL 249-254; | G3PDHDRGNASE 95-113; |
| | | | | PKC_PHOSPHO_SITE | G3PDHDRGNASE |
| | | | | 324-326; | 60-73; G3PDHDRGNASE |
| | | | | CK2_PHOSPHO_SITE | 122-138; gpdh_C |
| | | | | 287-290; MYRISTYL | 102-263; |
| | | | | 118-123; | G3PDHDRGNASE 179-196; |
| | | | | PKC_PHOSPHO_SITE | G3PDHDRGNASE |
| | | | | 195-197; | 219-234; GAPDH 99-106; |
| | | | | ASN_GLYCOSYLATION | gpdh 1-101; |
| | | | | 98-101; MYRISTYL | |
| | | | | 20-25; | |
| | | | | PKC_PHOSPHO_SITE | |
| | | | | 270-272; MYRISTYL | |
| | | | | 161-166; | |
| | | | | ASN_GLYCOSYLATION | |
| | | | | 188-191; | |
| | | | | CK2_PHOSPHO_SITE | |
| | | | | 297-300; MYRISTYL | |
| | | | | 247-252; | |
| | | | | PKC_PHOSPHO_SITE | |
| | | | | 291-293; | |
| | | | | CK2_PHOSPHO_SITE | |
| | | | | 291-294; MYRISTYL | |
| | | | | 344-349; | |
| | | | | CK2_PHOSPHO_SITE | |
| | | | | 261-264; | |
| | | | | PKC_PHOSPHO_SITE | |
| | | | | 92-94; | |
| | | | | CK2_PHOSPHO_SITE | |
| | | | | 52-55; MYRISTYL | |
| | | | | 308-313; MYRISTYL | |
| | | | | 49-54; | |
| | | | | CK2_PHOSPHO_SITE | |
| | | | | 190-193; | |
| | | | | PKC_PHOSPHO_SITE | |
| | | | | 141-143; MYRISTYL | |
| | | | | 324-329; MYRISTYL | |
| | | | | 150-155; | |
| | | | | CK2_PHOSPHO_SITE | |
| | | | | 242-245; | |
| | | | | PKC_PHOSPHO_SITE | |
| | | | | 133-135; MYRISTYL | |
| | | | | 340-345; MYRISTYL | |
| | | | | 122-127; | |
| DEX0477_055.aa.1 | N | 0 - o1-432; | 132-140, | CK2_PHOSPHO_SITE | EGGSHELL 51-61; |
| | | | 1.077; | 367-370; MYRISTYL | GLY_RICH 14-103; |
| | | | 148-158, | 83-88; MYRISTYL | TYPE1KERATIN 184-197; |
| | | | 1.103; | 79-84; | EGGSHELL 25-40; |
| | | | 372-380, | CK2_PHOSPHO_SITE | filament 104-430; |
| | | | 1.078; | 349-352; MYRISTYL | TYPE1KERATIN |
| | | | 391-418, | 408-413; MYRISTYL | 343-369; EGGSHELL |
| | | | 1.098; | 39-44; MYRISTYL | 88-106; |
| | | | 305-316, | 58-63; MYRISTYL | |
| | | | 1.131; | 210-215; MYRISTYL | |
| | | | 21-26, 1.028; | 405-410; MYRISTYL | |
| | | | 224-235, | 37-42; | |
| | | | 1.124; | CK2_PHOSPHO_SITE | |
| | | | 44-55, 1.071; | 357-360; MYRISTYL | |
| | | | 192-218, 1.17; | 82-87; | |
| | | | 291-301, | LEUCINE_ZIPPER | |
| | | | 1.106; | 179-200; | |
| | | | 275-281, | PKC_PHOSPHO_SITE | |
| | | | 1.062; | 48-50; MYRISTYL | |
| | | | 175-181, | 90-95; | |
| | | | 1.096; | PKC_PHOSPHO_SITE | |
| | | | 64-70, 1.055; | 380-382; MYRISTYL | |
| | | | 251-263, | 91-96; | |
| | | | 1.108; | CK2_PHOSPHO_SITE | |
| | | | 115-126, | 388-391; MYRISTYL | |
| | | | 1.095; | 71-76; | |
| | | | | CK2_PHOSPHO_SITE | |
| | | | | 338-341; MYRISTYL | |
| | | | | 14-19; MYRISTYL | |
| | | | | 94-99; MYRISTYL | |
| | | | | 99-104; | |
| | | | | PKC_PHOSPHO_SITE | |
| | | | | 356-358; | |
| | | | | CK2_PHOSPHO_SITE | |
| | | | | 263-266; MYRISTYL | |
| | | | | 87-92; MYRISTYL | |
| | | | | 55-60; MYRISTYL | |
| | | | | 63-68; MYRISTYL | |
| | | | | 95-100; | |
| | | | | CK2_PHOSPHO_SITE | |
| | | | | 170-173; MYRISTYL | |
| | | | | 28-33; | |
| | | | | LEUCINE_ZIPPER | |
| | | | | 251-272; | |
| | | | | LEUCINE_ZIPPER | |
| | | | | 258-279; MYRISTYL | |
| | | | | 33-38; MYRISTYL | |
| | | | | 57-62; MYRISTYL | |
| | | | | 84-89; MYRISTYL | |
| | | | | 86-91; MYRISTYL | |
| | | | | 27-32; | |
| | | | | CK2_PHOSPHO_SITE | |
| | | | | 118-121; MYRISTYL | |
| | | | | 78-83; MYRISTYL | |
| | | | | 70-75; MYRISTYL | |
| | | | | 98-103; | |
| | | | | CK2_PHOSPHO_SITE | |
| | | | | 102-105; MYRISTYL | |
| | | | | 74-79; | |
| | | | | PKC_PHOSPHO_SITE | |
| | | | | 17-19; MYRISTYL | |
| | | | | 21-26; MYRISTYL | |
| | | | | 307-312; | |
| | | | | CK2_PHOSPHO_SITE | |
| | | | | 159-162; MYRISTYL | |
| | | | | 32-37; MYRISTYL | |
| | | | | 384-389; MYRISTYL | |
| | | | | 16-21; | |
| DEX0477_055.orf.1 | Y | 0 - o1-360; | 116-128, | ASN_GLYCOSYLATION | TYPE1KERATIN 163-183; |
| | | | 1.108; | 15-18; | filament 43-320; |
| | | | 349-356, | ASN_GLYCOSYLATION | IF 307-315; |
| | | | 1.131; | 20-23; | TYPE1KERATIN 109-132; |
| | | | 156-166, | CK2_PHOSPHO_SITE | TYPE1KERATIN |
| | | | 1.106; | 253-256; | 261-287; |
| | | | 89-100, 1.124; | LEUCINE_ZIPPER | TYPE1KERATIN 235-250; |
| | | | 170-181, | 123-144; | |
| | | | 1.131; | CK2_PHOSPHO_SITE | |
| | | | 58-83, 1.17; | 301-304; | |
| | | | 237-245, | CK2_PHOSPHO_SITE | |
| | | | 1.078; | 128-131; MYRISTYL | |
| | | | 305-316, | 332-337; MYRISTYL | |
| | | | 1.074; | 75-80; | |
| | | | 256-283, | LEUCINE_ZIPPER | |
| | | | 1.098; | 116-137; MYRISTYL | |
| | | | 294-300, | 172-177; | |
| | | | 1.062; | PKC_PHOSPHO_SITE | |
| | | | 341-347, | 21-23; MYRISTYL | |
| | | | 1.058; | 333-338; | |
| | | | 140-146, | PKC_PHOSPHO_SITE | |
| | | | 1.062; | 221-223; MYRISTYL | |
| | | | | 249-254; | |
| | | | | PKC_PHOSPHO_SITE | |
| | | | | 43-45; MYRISTYL | |
| | | | | 325-330; MYRISTYL | |
| | | | | 273-278; | |
| | | | | PKC_PHOSPHO_SITE | |
| | | | | 309-311; MYRISTYL | |
| | | | | 270-275; | |
| | | | | CK2_PHOSPHO_SITE | |
| | | | | 312-315; | |
| | | | | CK2_PHOSPHO_SITE | |
| | | | | 203-206; | |
| | | | | CK2_PHOSPHO_SITE | |
| | | | | 232-235; MYRISTYL | |
| | | | | 350-355; MYRISTYL | |
| | | | | 335-340; | |
| | | | | PKC_PHOSPHO_SITE | |
| | | | | 355-357; MYRISTYL | |
| | | | | 334-339; | |
| | | | | CK2_PHOSPHO_SITE | |
| | | | | 214-217; | |
| | | | | PKC_PHOSPHO_SITE | |
| | | | | 245-247; | |
| | | | | CK2_PHOSPHO_SITE | |
| | | | | 222-225; | |
| | | | | TYR_PHOSPHO_SITE | |
| | | | | 302-310; | |
| DEX0477_055.aa.2 | N | 0 - o1-393; | 174-181, | CK2_PHOSPHO_SITE | TYPE1KERATIN 357-383; |
| | | | 1.096; | 299-302; MYRISTYL | EGGSHELL 51-61; |
| | | | 43-55, 1.071; | 83-88; MYRISTYL | TYPE1KERATIN |
| | | | 64-70, 1.055; | 70-75; | 184-197; filament |
| | | | 132-141, | CK2_PHOSPHO_SITE | 104-391; |
| | | | 1.077; | 328-331; MYRISTYL | TYPE1KERATIN 331-346; |
| | | | 212-224, | 87-92; | GLY_RICH 14-103; |
| | | | 1.108; | CK2_PHOSPHO_SITE | EGGSHELL 88-106; |
| | | | 115-126, | 318-321; MYRISTYL | TYPE1KERATIN |
| | | | 1.095; | 55-60; MYRISTYL | 259-279; EGGSHELL |
| | | | 143-158, | 63-68; MYRISTYL | 25-40; TYPE1KERATIN |
| | | | 1.103; | 28-33; MYRISTYL | 205-228; |
| | | | 266-277, | 37-42; | |
| | | | 1.131; | CK2_PHOSPHO_SITE | |
| | | | 236-242, | 310-313; MYRISTYL | |
| | | | 1.062; | 98-103; MYRISTYL | |
| | | | 74-79, 1.028; | 79-84; MYRISTYL | |
| | | | 21-26, 1.028; | 268-273; | |
| | | | 252-262, | LEUCINE_ZIPPER | |
| | | | 1.106; | 219-240; MYRISTYL | |
| | | | 333-343, | 57-62; | |
| | | | 1.078; | LEUCINE_ZIPPER | |
| | | | 352-379, | 212-233; | |
| | | | 1.098; | CK2_PHOSPHO_SITE | |
| | | | | 349-352; | |
| | | | | CK2_PHOSPHO_SITE | |
| | | | | 224-227; MYRISTYL | |
| | | | | 95-100; MYRISTYL | |
| | | | | 14-19; | |
| | | | | CK2_PHOSPHO_SITE | |
| | | | | 170-173; MYRISTYL | |
| | | | | 32-37; | |
| | | | | PKC_PHOSPHO_SITE | |
| | | | | 341-343; MYRISTYL | |
| | | | | 74-79; MYRISTYL | |
| | | | | 21-26; MYRISTYL | |
| | | | | 94-99; MYRISTYL | |
| | | | | 27-32; | |
| | | | | CK2_PHOSPHO_SITE | |
| | | | | 102-105; MYRISTYL | |
| | | | | 366-371; MYRISTYL | |
| | | | | 78-83; MYRISTYL | |
| | | | | 91-96; MYRISTYL | |
| | | | | 345-350; MYRISTYL | |
| | | | | 71-76; | |
| | | | | PKC_PHOSPHO_SITE | |
| | | | | 317-319; | |
| | | | | CK2_PHOSPHO_SITE | |
| | | | | 118-121; MYRISTYL | |
| | | | | 16-21; MYRISTYL | |
| | | | | 86-91; MYRISTYL | |
| | | | | 33-38; MYRISTYL | |
| | | | | 99-104; MYRISTYL | |
| | | | | 369-374; MYRISTYL | |
| | | | | 82-87; MYRISTYL | |
| | | | | 39-44; | |
| | | | | PKC_PHOSPHO_SITE | |
| | | | | 17-19; MYRISTYL | |
| | | | | 90-95; | |
| | | | | PKC_PHOSPHO_SITE | |
| | | | | 48-50; | |
| | | | | CK2_PHOSPHO_SITE | |
| | | | | 159-162; MYRISTYL | |
| | | | | 58-63; MYRISTYL | |
| | | | | 84-89; | |
| DEX0477_055.orf.2 | N | 0 - o1-499; | 221-233, | MYRISTYL 67-72; | IF 412-420; |
| | | | 1.108; | MYRISTYL 41-46; | EGGSHELL 60-70; |
| | | | 399-405, | MYRISTYL 91-96; | TYPE1KERATIN 193-206; |
| | | | 1.062; | CK2_PHOSPHO_SITE | TYPE1KERATIN |
| | | | 184-190, | 111-114; | 214-237; EGGSHELL |
| | | | 1.096; | CK2_PHOSPHO_SITE | 97-115; EGGSHELL |
| | | | 275-286, | 417-420; | 34-49; TYPE1KERATIN |
| | | | 1.131; | PKC_PHOSPHO_SITE | 268-288; |
| | | | 157-167, | 26-28; MYRISTYL | TYPE1KERATIN 340-355; |
| | | | 1.103; | 93-98; MYRISTYL | TYPE1KERATIN |
| | | | 141-149, | 46-51; MYRISTYL | 366-392; GLY_RICH |
| | | | 1.077; | 80-85; | 23-112; filament |
| | | | 465-489, 1.13; | LEUCINE_ZIPPER | 113-425; |
| | | | 73-79, 1.055; | 228-249; MYRISTYL | |
| | | | 245-251, | 37-42; MYRISTYL | |
| | | | 1.062; | 107-112; | |
| | | | 342-350, | CK2_PHOSPHO_SITE | |
| | | | 1.078; | 233-236; | |
| | | | 53-64, 1.071; | CK2_PHOSPHO_SITE | |
| | | | 361-388, | 168-171; MYRISTYL | |
| | | | 1.098; | 96-101; MYRISTYL | |
| | | | 410-421, | 100-105; MYRISTYL | |
| | | | 1.074; | 25-30; MYRISTYL | |
| | | | 261-271, | 30-35; MYRISTYL | |
| | | | 1.106; | 354-359; | |
| | | | 30-35, 1.028; | CK2_PHOSPHO_SITE | |
| | | | 4-10, 1.067; | 406-409; | |
| | | | 124-135, | PKC_PHOSPHO_SITE | |
| | | | 1.095; | 350-352; MYRISTYL | |
| | | | 455-463, | 23-28; | |
| | | | 1.084; | PKC_PHOSPHO_SITE | |
| | | | 432-445, | 326-328; MYRISTYL | |
| | | | 1.184; | 79-84; MYRISTYL | |
| | | | | 87-92; | |
| | | | | CK2_PHOSPHO_SITE | |
| | | | | 337-340; MYRISTYL | |
| | | | | 99-104; | |
| | | | | CK2_PHOSPHO_SITE | |
| | | | | 179-182; MYRISTYL | |
| | | | | 72-77; | |
| | | | | CK2_PHOSPHO_SITE | |
| | | | | 308-311; MYRISTYL | |
| | | | | 92-97; MYRISTYL | |
| | | | | 104-109; MYRISTYL | |
| | | | | 42-47; | |
| | | | | CK2_PHOSPHO_SITE | |
| | | | | 319-322; MYRISTYL | |
| | | | | 103-108; MYRISTYL | |
| | | | | 277-282; | |
| | | | | LEUCINE_ZIPPER | |
| | | | | 221-242; MYRISTYL | |
| | | | | 88-93; MYRISTYL | |
| | | | | 108-113; | |
| | | | | CK2_PHOSPHO_SITE | |
| | | | | 127-130; | |
| | | | | CK2_PHOSPHO_SITE | |
| | | | | 358-361; | |
| | | | | TYR_PHOSPHO_SITE | |
| | | | | 407-415; | |
| | | | | CAMP_PHOSPHO_SITE | |
| | | | | 493-496; | |
| | | | | PKC_PHOSPHO_SITE | |
| | | | | 57-59; MYRISTYL | |
| | | | | 83-88; | |
| | | | | PKC_PHOSPHO_SITE | |
| | | | | 414-416; MYRISTYL | |
| | | | | 64-69; | |
| | | | | CK2_PHOSPHO_SITE | |
| | | | | 327-330; MYRISTYL | |
| | | | | 491-496; MYRISTYL | |
| | | | | 36-41; MYRISTYL | |
| | | | | 378-383; MYRISTYL | |
| | | | | 66-71; MYRISTYL | |
| | | | | 375-380; MYRISTYL | |
| | | | | 95-100; MYRISTYL | |
| | | | | 48-53; | |
| DEX0477_055.orf.3 | N | 0 - o1-458, | 124-135, | MYRISTYL 67-72; | filament 113-425; |
| | | | 1.095; | CK2_PHOSPHO_SITE | IF 412-420; |
| | | | 245-251, | 417-420; MYRISTYL | TYPE1KERATIN 214-237; |
| | | | 1.062; | 378-383; MYRISTYL | TYPE1KERATIN |
| | | | 184-190, | 354-359; MYRISTYL | 366-392; EGGSHELL |
| | | | 1.096; | 66-71; MYRISTYL | 97-115; |
| | | | 30-35, 1.028; | 430-435; | TYPE1KERATIN 340-355; |
| | | | 53-64, 1.071; | CK2_PHOSPHO_SITE | TYPE1KERATIN |
| | | | 261-271, | 319-322; MYRISTYL | 193-206; GLY_RICH |
| | | | 1.106; | 277-282; | 23-112; |
| | | | 157-167, | PKC_PHOSPHO_SITE | TYPE1KERATIN 268-288; |
| | | | 1.103; | 57-59; MYRISTYL | EGGSHELL 60-70; |
| | | | 141-149, | 48-53; | EGGSHELL 34-49; |
| | | | 1.077; | CK2_PHOSPHO_SITE | |
| | | | 73-79, 1.055; | 308-311; MYRISTYL | |
| | | | 221-233, | 64-69; MYRISTYL | |
| | | | 1.108; | 108-113; MYRISTYL | |
| | | | 399-405, | 450-455; | |
| | | | 1.062; | TYR_PHOSPHO_SITE | |
| | | | 436-448, 1.13; | 407-415; MYRISTYL | |
| | | | 342-350, | 375-380; MYRISTYL | |
| | | | 1.078; | 72-77; MYRISTYL | |
| | | | 410-421, | 46-51; MYRISTYL | |
| | | | 1.074; 4-10, | 104-109; MYRISTYL | |
| | | | 1.067; | 83-88; | |
| | | | 275-286, | CK2_PHOSPHO_SITE | |
| | | | 1.131; | 327-330; MYRISTYL | |
| | | | 361-388, | 88-93; | |
| | | | 1.098; | CK2_PHOSPHO_SITE | |
| | | | | 406-409; | |
| | | | | LEUCINE_ZIPPER | |
| | | | | 228-249; | |
| | | | | CK2_PHOSPHO_SITE | |
| | | | | 358-361; | |
| | | | | PKC_PHOSPHO_SITE | |
| | | | | 26-28; MYRISTYL | |
| | | | | 107-112; | |
| | | | | CAMP_PHOSPHO_SITE | |
| | | | | 452-455; MYRISTYL | |
| | | | | 87-92; | |
| | | | | CK2_PHOSPHO_SITE | |
| | | | | 337-340; | |
| | | | | PKC_PHOSPHO_SITE | |
| | | | | 350-352; MYRISTYL | |
| | | | | 23-28; MYRISTYL | |
| | | | | 95-100; MYRISTYL | |
| | | | | 96-101; MYRISTYL | |
| | | | | 41-46; | |
| | | | | CK2_PHOSPHO_SITE | |
| | | | | 179-182; MYRISTYL | |
| | | | | 99-104; MYRISTYL | |
| | | | | 42-47; | |
| | | | | CK2_PHOSPHO_SITE | |
| | | | | 233-236; MYRISTYL | |
| | | | | 93-98; | |
| | | | | LEUCINE_ZIPPER | |
| | | | | 221-242; | |
| | | | | CK2_PHOSPHO_SITE | |
| | | | | 168-171; | |
| | | | | PKC_PHOSPHO_SITE | |
| | | | | 326-328; MYRISTYL | |
| | | | | 37-42; | |
| | | | | PKC_PHOSPHO_SITE | |
| | | | | 414-416; MYRISTYL | |
| | | | | 103-108; MYRISTYL | |
| | | | | 25-30; MYRISTYL | |
| | | | | 80-85; MYRISTYL | |
| | | | | 91-96; MYRISTYL | |
| | | | | 30-35; MYRISTYL | |
| | | | | 100-105; | |
| | | | | CK2_PHOSPHO_SITE | |
| | | | | 111-114; MYRISTYL | |
| | | | | 92-97; MYRISTYL | |
| | | | | 79-84; MYRISTYL | |
| | | | | 36-41; | |
| | | | | CK2_PHOSPHO_SITE | |
| | | | | 127-130; | |
| DEX0477_055.aa.4 | N | 0 - o1-281; | 247-271, 1.13; | MYRISTYL 83-88; | TYPE1KERATIN 184-197; |
| | | | 115-126, | MYRISTYL 79-84; | EGGSHELL 88-106; |
| | | | 1.095; | MYRISTYL 14-19; | EGGSHELL 51-61; |
| | | | 175-181, | MYRISTYL 57-62; | filament 104-260; |
| | | | 1.096; | MYRISTYL 27-32; | GLY_RICH 14-103; |
| | | | 21-26, 1.028; | MYRISTYL 98-103; | EGGSHELL 25-40; |
| | | | 237-245, | MYRISTYL 78-83; | TYPE1KERATIN |
| | | | 1.084; | MYRISTYL 71-76; | 205-228; |
| | | | 148-158, | MYRISTYL 99-104; | |
| | | | 1.103; | MYRISTYL 70-75; | |
| | | | 212-224, | CK2_PHOSPHO_SITE | |
| | | | 1.108; | 118-121; | |
| | | | 132-140, | PKC_PHOSPHO_SITE | |
| | | | 1.077; | 17-19; MYRISTYL | |
| | | | 64-70, 1.055; | 87-92; | |
| | | | 44-55, 1.071; | CK2_PHOSPHO_SITE | |
| | | | | 102-105; MYRISTYL | |
| | | | | 63-68; MYRISTYL | |
| | | | | 37-42; | |
| | | | | CK2_PHOSPHO_SITE | |
| | | | | 170-173; | |
| | | | | PKC_PHOSPHO_SITE | |
| | | | | 48-50; MYRISTYL | |
| | | | | 55-60; MYRISTYL | |
| | | | | 94-99; MYRISTYL | |
| | | | | 82-87; MYRISTYL | |
| | | | | 84-89; MYRISTYL | |
| | | | | 21-26; | |
| | | | | CK2_PHOSPHO_SITE | |
| | | | | 224-227; | |
| | | | | CAMP_PHOSPHO_SITE | |
| | | | | 275-278; MYRISTYL | |
| | | | | 58-63; MYRISTYL | |
| | | | | 32-37; MYRISTYL | |
| | | | | 90-95; MYRISTYL | |
| | | | | 39-44; | |
| | | | | CK2_PHOSPHO_SITE | |
| | | | | 159-162; MYRISTYL | |
| | | | | 33-38; MYRISTYL | |
| | | | | 273-278; MYRISTYL | |
| | | | | 86-91; MYRISTYL | |
| | | | | 28-33; MYRISTYL | |
| | | | | 91-96; MYRISTYL | |
| | | | | 95-100; MYRISTYL | |
| | | | | 74-79; MYRISTYL | |
| | | | | 16-21; | |
| DEX0477_056.aa.1 | N | 0 - o1-49; | 28-42, 1.156; | | |
| | | | 12-25, 1.232; | | |
| DEX0477_056.orf.1 | N | 0 - o1-98; | | PKC_PHOSPHO_SITE | |
| | | | | 71-73; | |
| | | | | CK2_PHOSPHO_SITE | |
| | | | | 13-16; | |
| DEX0477_057.aa.1 | N | 0 - o1-226; | 201-207, | CK2_PHOSPHO_SITE | |
| | | | 1.059; | 26-29; MYRISTYL | |
| | | | 163-169, | 23-28; MYRISTYL | |
| | | | 1.065; | 45-50; | |
| | | | 70-92, 1.122; | CK2_PHOSPHO_SITE | |
| | | | 34-41, 1.163; | 65-68; MYRISTYL | |
| | | | 21-27, 1.079; | 32-37; | |
| | | | 109-116, | ASN_GLYCOSYLATION | |
| | | | 1.069; 4-15, | 53-56; MYRISTYL | |
| | | | 1.129; | 70-75; MYRISTYL | |
| | | | 132-150, | 129-134; MYRISTYL | |
| | | | 1.227; | 163-168; MYRISTYL | |
| | | | | 126-131; | |
| | | | | CK2_PHOSPHO_SITE | |
| | | | | 90-93; MYRISTYL | |
| | | | | 86-91; | |
| | | | | CK2_PHOSPHO_SITE | |
| | | | | 167-170; MYRISTYL | |
| | | | | 211-216; | |
| | | | | PKC_PHOSPHO_SITE | |
| | | | | 95-97; | |
| | | | | PKC_PHOSPHO_SITE | |
| | | | | 138-140; MYRISTYL | |
| | | | | 108-113; | |
| | | | | CK2_PHOSPHO_SITE | |
| | | | | 74-77; | |
| DEX0477_058.aa.1 | Y | 1 - i1-114; | 23-44, 1.2; | CK2_PHOSPHO_SITE | |
| | | tm115-137; | 190-195, | 48-51; MYRISTYL | |
| | | o138-208; | 1.066; | 171-176; | |
| | | | 75-104, 1.25; | CK2_PHOSPHO_SITE | |
| | | | 4-18, 1.276; | 74-77; | |
| | | | 51-62, 1.207; | PKC_PHOSPHO_SITE | |
| | | | 176-182, | 74-76; | |
| | | | 1.071; | ASN_GLYCOSYLATION | |
| | | | 112-144, | 72-75; | |
| | | | 1.246; | ASN_GLYCOSYLATION | |
| | | | 165-172, | 63-66; | |
| | | | 1.083; | CK2_PHOSPHO_SITE | |
| | | | | 177-180; | |
| | | | | CK2_PHOSPHO_SITE | |
| | | | | 199-202; | |
| | | | | PKC_PHOSPHO_SITE | |
| | | | | 112-114; | |
| DEX0477_058.aa.2 | N | 0 - o1-170; | 39-67, 1.162; | MYRISTYL 125-130; | |
| | | | 7-14, 1.056; | PKC_PHOSPHO_SITE | |
| | | | 72-88, 1.129; | 96-98; MYRISTYL | |
| | | | 105-112, | 60-65; MYRISTYL | |
| | | | 1.109; | 89-94; MYRISTYL | |
| | | | 128-165, | 112-117; | |
| | | | 1.183; | CK2_PHOSPHO_SITE | |
| | | | 16-34, 1.096; | 99-102; | |
| | | | | PKC_PHOSPHO_SITE | |
| | | | | 33-35; | |
| DEX0477_059.aa.1 | N | 0 - o1-67; | 34-46, 1.073; | PKC_PHOSPHO_SITE | |
| | | | 53-63, 1.224; | 40-42; | |
| | | | | PKC_PHOSPHO_SITE | |
| | | | | 34-36; | |
| | | | | CK2_PHOSPHO_SITE | |
| | | | | 27-30; | |
| DEX0477_059.aa.2 | N | 0 - o1-32; | | MICROBODIES_CTER | |
| | | | | 30-32; | |
| | | | | PKC_PHOSPHO_SITE | |
| | | | | 29-31; | |
| DEX0477_059.orf.2 | Y | 0 - o1-74; | | PKC_PHOSPHO_SITE | |
| | | | | 57-59; | |
| | | | | ASN_GLYCOSYLATION | |
| | | | | 30-33; | |
| DEX0477_060.aa.1 | N | 0 - i1-66; | 19-30, 1.087; | MYRISTYL 57-62; | Cadherin_C_term 1-59; |
| | | | 49-58, 1.068; | CK2_PHOSPHO_SITE | |
| | | | | 33-36; MYRISTYL | |
| | | | | 23-28; | |
| | | | | PKC_PHOSPHO_SITE | |
| | | | | 11-13; | |
| | | | | CK2_PHOSPHO_SITE | |
| | | | | 35-38; | |
| | | | | CK2_PHOSPHO_SITE | |
| | | | | 61-64; MYRISTYL | |
| | | | | 19-24; | |
| | | | | CK2_PHOSPHO_SITE | |
| | | | | 26-29; | |
| | | | | CK2_PHOSPHO_SITE | |
| | | | | 7-10; | |
| DEX0477_060.orf.1 | N | 0 - o1-94; | | CK2_PHOSPHO_SITE | |
| | | | | 39-42; | |
| | | | | PKC_PHOSPHO_SITE | |
| | | | | 6-8; | |
| DEX0477_060.aa.2 | N | 0 - o1-30; | 4-13, 1.067; | MYRISTYL 17-22; | |
| | | | 15-27, 1.22; | | |
| DEX0477_060.orf.2 | N | 0 - o1-94; | | PKC_PHOSPHO_SITE | |
| | | | | 6-8; | |
| | | | | CK2_PHOSPHO_SITE | |
| | | | | 39-42; | |
| DEX0477_061.aa.1 | N | 1 - i1-47; | 45-86, 1.252; | PKC_PHOSPHO_SITE | |
| | | tm48-70; | 24-34, 1.164; | 5-7; | |
| | | o71-147; | 36-41, 1.053; | CK2_PHOSPHO_SITE | |
| | | | 103-141, | 41-44; | |
| | | | 1.159; | PKC_PHOSPHO_SITE | |
| | | | 88-95, 1.053; | 78-80; | |
| | | | 12-18, 1.103; | CK2_PHOSPHO_SITE | |
| | | | | 5-8; | |
| | | | | PKC_PHOSPHO_SITE | |
| | | | | 41-43; MYRISTYL | |
| | | | | 111-116; | |
| | | | | CAMP_PHOSPHO_SITE | |
| | | | | 33-36; | |
| | | | | PKC_PHOSPHO_SITE | |
| | | | | 38-40; MYRISTYL | |
| | | | | 96-101; | |
| DEX0477_062.aa.1 | N | 0 - o1-353; | 225-243, | PKC_PHOSPHO_SITE | HSP70_3 98-112; |
| | | | 1.108; | 104-106; | HEATSHOCK70 235-251; |
| | | | 337-343, | CK2_PHOSPHO_SITE | HEATSHOCK70 |
| | | | 1.063; | 275-278; | 154-173; |
| | | | 24-33, 1.036; | PKC_PHOSPHO_SITE | HEATSHOCK70 127-147; |
| | | | 200-209, | 12-14; | HEATSHOCK70 |
| | | | 1.174; | CK2_PHOSPHO_SITE | 95-111; HSP70 2-346; |
| | | | 95-104, 1.184; | 316-319; | sp_P08109_HS7C_MOUSE |
| | | | 78-84, 1.059; | PKC_PHOSPHO_SITE | 1-323; |
| | | | 152-167, | 259-261; MYRISTYL | |
| | | | 1.181; | 166-171; | |
| | | | 324-330, | CK2_PHOSPHO_SITE | |
| | | | 1.052; | 253-256; | |
| | | | 107-116, | CK2_PHOSPHO_SITE | |
| | | | 1.084; | 50-53; | |
| | | | 40-55, 1.063; | PKC_PHOSPHO_SITE | |
| | | | 249-257, | 301-303; | |
| | | | 1.146; | CAMP_PHOSPHO_SITE | |
| | | | 173-179, | 179-182; MYRISTYL | |
| | | | 1.119; | 171-176; | |
| | | | 130-146, | CK2_PHOSPHO_SITE | |
| | | | 1.142; | 194-197; | |
| | | | | CK2_PHOSPHO_SITE | |
| | | | | 29-32; | |
| | | | | ASN_GLYCOSYLATION | |
| | | | | 124-127; | |
| | | | | PKC_PHOSPHO_SITE | |
| | | | | 326-328; | |
| | | | | CK2_PHOSPHO_SITE | |
| | | | | 259-262; | |
| | | | | TYR_PHOSPHO_SITE | |
| | | | | 281-289; | |
| | | | | ASN_GLYCOSYLATION | |
| | | | | 181-184; | |
| | | | | ASN_GLYCOSYLATION | |
| | | | | 251-254; | |
| DEX0477_062.orf.1 | Y | 0 - o1-205; | | ASN_GLYCOSYLATION | HEATSHOCK70 105-121; |
| | | | | 51-54; | HEATSHOCK70 |
| | | | | CK2_PHOSPHO_SITE | 24-43; |
| | | | | 64-67; | sp_P19378_HS7C_CRIGR |
| | | | | CK2_PHOSPHO_SITE | 6-193; HSP70 1-201; |
| | | | | 186-189; MYRISTYL | |
| | | | | 41-46; | |
| | | | | PKC_PHOSPHO_SITE | |
| | | | | 171-173; | |
| | | | | ASN_GLYCOSYLATION | |
| | | | | 121-124; | |
| | | | | CAMP_PHOSPHO_SITE | |
| | | | | 49-52; | |
| | | | | PKC_PHOSPHO_SITE | |
| | | | | 202-204; | |
| | | | | CK2_PHOSPHO_SITE | |
| | | | | 145-148; | |
| | | | | PKC_PHOSPHO_SITE | |
| | | | | 196-198; | |
| | | | | MICROBODIES_CTER | |
| | | | | 203-205; | |
| | | | | PKC_PHOSPHO_SITE | |
| | | | | 129-131; MYRISTYL | |
| | | | | 36-41; | |
| | | | | CK2_PHOSPHO_SITE | |
| | | | | 129-132; | |
| | | | | TYR_PHOSPHO_SITE | |
| | | | | 151-159; | |
| | | | | CK2_PHOSPHO_SITE | |
| | | | | 123-126; | |
| DEX0477_063.aa.1 | N | 0 - o1-118; | 82-96, 1.171; | CK2_PHOSPHO_SITE | CD225 71-117; |
| | | | 24-35, 1.06; | 11-14; MYRISTYL | |
| | | | 99-115, 1.224; | 64-69; | |
| | | | 42-50, 1.079; | CK2_PHOSPHO_SITE | |
| | | | 57-79, 1.155; | 84-87; | |
| | | | | ASN_GLYCOSYLATION | |
| | | | | 36-39; MYRISTYL | |
| | | | | 20-25; | |
| | | | | PKC_PHOSPHO_SITE | |
| | | | | 50-52; MYRISTYL | |
| | | | | 19-24; | |
| | | | | PKC_PHOSPHO_SITE | |
| | | | | 113-115; | |
| DEX0477_063.orf.1 | N | 2 - i1-94; | 63-85, 1.155; | PKC_PHOSPHO_SITE | CD225 77-159; |
| | | tm95-117; | 132-177, 1.21; | 56-58; MYRISTYL | |
| | | o118-144; | 4-19, 1.109; | 26-31; | |
| | | tm145-167; | 105-120, | PKC_PHOSPHO_SITE | |
| | | i168-183; | 1.179; | 139-141; | |
| | | | 48-56, 1.079; | ASN_GLYCOSYLATION | |
| | | | 30-41, 1.06; | 42-45; MYRISTYL | |
| | | | 88-103, 1.171; | 70-75; MYRISTYL | |
| | | | | 151-156; | |
| | | | | CK2_PHOSPHO_SITE | |
| | | | | 4-7; | |
| | | | | PKC_PHOSPHO_SITE | |
| | | | | 118-120; | |
| | | | | CK2_PHOSPHO_SITE | |
| | | | | 90-93; | |
| DEX0477_063.aa.2 | N | 0 - o1-87; | 68-84, 1.224; | PKC_PHOSPHO_SITE | CD225 40-86; |
| | | | 5-15, 1.081; | 82-84; | |
| | | | 26-48, 1.155; | ASN_GLYCOSYLATION | |
| | | | 51-65, 1.171; | 2-5; | |
| | | | | CK2_PHOSPHO_SITE | |
| | | | | 53-56; MYRISTYL | |
| | | | | 33-38; MYRISTYL | |
| | | | | 15-20; | |
| DEX0477_063.orf.2 | N | 2 - o1-67; | 105-150, 1.21; | CK2_PHOSPHO_SITE | CD225 50-132; |
| | | tm68-90; | 15-25, 1.081; | 6-9; | |
| | | i91-115; | 78-93, 1.179; | PKC_PHOSPHO_SITE | |
| | | tm116-138; | 61-76, 1.171; | 112-114; | |
| | | o139-156; | 36-58, 1.155; | CK2_PHOSPHO_SITE | |
| | | | | 63-66; | |
| | | | | PKC_PHOSPHO_SITE | |
| | | | | 91-93; MYRISTYL | |
| | | | | 25-30; | |
| | | | | CAMP_PHOSPHO_SITE | |
| | | | | 3-6; MYRISTYL | |
| | | | | 124-129; MYRISTYL | |
| | | | | 43-48; | |
| | | | | ASN_GLYCOSYLATION | |
| | | | | 12-15; | |
| DEX0477_064.aa.1 | N | 0 - i1-76; | 4-10, 1.085; | MYRISTYL 39-44; | |
| | | | 48-73, 1.224; | CK2_PHOSPHO_SITE | |
| | | | 14-26, 1.13; | 72-75; | |
| | | | | CK2_PHOSPHO_SITE | |
| | | | | 16-19; | |
| | | | | PKC_PHOSPHO_SITE | |
| | | | | 28-30; | |
| DEX0477_064.orf.1 | N | 0 - o1-105; | 29-37, 1.168; | CAMP_PHOSPHO_SITE | |
| | | | 17-23, 1.074; | 100-103; MYRISTYL | |
| | | | 4-12, 1.107; | 22-27; | |
| | | | 41-46, 1.048; | CK2_PHOSPHO_SITE | |
| | | | 54-83, 1.159; | 24-27; | |
| | | | | PKC_PHOSPHO_SITE | |
| | | | | 91-93; AMIDATION | |
| | | | | 45-48; | |
| | | | | PKC_PHOSPHO_SITE | |
| | | | | 45-47; MYRISTYL | |
| | | | | 17-22; | |
| | | | | PKC_PHOSPHO_SITE | |
| | | | | 38-40; | |
| | | | | CK2_PHOSPHO_SITE | |
| | | | | 87-90; | |
| DEX0477_065.aa.1 | Y | 2 - i1-6; | 63-68, 1.11; | MYRISTYL 61-66; | |
| | | tm7-28; | 43-56, 1.154; | CK2_PHOSPHO_SITE | |
| | | o29-55; | 74-79, 1.092; | 35-38; | |
| | | tm56-78; | 4-21, 1.287; | | |
| | | i79-109; | 23-34, 1.178; | | |
| | | | 89-106, 1.13; | | |
| DEX0477_065.orf.1 | N | 3 - i1-35; | 34-51, 1.287; | CK2_PHOSPHO_SITE | |
| | | tm36-58; | 73-86, 1.154; | 65-68; MYRISTYL | |
| | | o59-85; | 104-109, | 91-96; | |
| | | tm86-108; | 1.092; 8-32, | | |
| | | i109-120; | 1.186; 53-64, | | |
| | | tm121-143; | 1.178; 93-98, | | |
| | | o144-153; | 1.11; 119-140, | | |
| | | | 1.254; | | |
| DEX0477_065.aa.2 | Y | 0 - o1-61; | 4-10, 1.062; | MYRISTYL 6-11; | |
| | | | 29-53, 1.186; | CK2_PHOSPHO_SITE | |
| | | | | 24-27; MYRISTYL | |
| | | | | 10-15; | |
| DEX0477_065.orf.2 | N | 2 - o1-34; | 22-35, 1.154; | MYRISTYL 40-45; | |
| | | tm35-57; | 53-58, 1.092; | CK2_PHOSPHO_SITE | |
| | | i58-69; | 68-89, 1.254; | 14-17; | |
| | | tm70-92; | 42-47, 1.11; | | |
| | | o93-102; | 4-13, 1.178; | | |
| DEX0477_065.aa.3 | N | 1 - o1-31; | 69-80, 1.154; | CK2_PHOSPHO_SITE | |
| | | tm32-54; | 4-28, 1.186; | 61-64; | |
| | | i55-83; | 49-60, 1.178; | | |
| | | | 30-47, 1.287; | | |
| DEX0477_066.aa.1 | Y | 3 - i1-6; | 63-68, 1.11; | MYRISTYL 61-66; | |
| | | tm7-28; | 74-79, 1.092; | CK2_PHOSPHO_SITE | |
| | | o29-55; | 89-110, 1.254; | 35-38; | |
| | | tm56-78; | 43-56, 1.154; | | |
| | | i79-90; | 23-34, 1.178; | | |
| | | tm91-113; | 4-21, 1.287; | | |
| | | o114-123; | | | |
| DEX0477_066.aa.2 | N | 1 - o1-31; | 49-60, 1.178; | CK2_PHOSPHO_SITE | |
| | | tm32-54; | 30-47, 1.287; | 61-64; | |
| | | i55-83; | 4-28, 1.186; | | |
| | | | 69-80, 1.154; | | |
| DEX0477_067.aa.1 | N | 0 - o1-95; | 42-47, 1.079; | MYRISTYL 20-25; | efhand 53-81; |
| | | | 11-18, 1.077; | MYRISTYL 23-28; | sp_P25815_S10E_HUMAN |
| | | | 32-39, 1.067; | PKC_PHOSPHO_SITE | 2-71; EFh 53-81; |
| | | | 68-89, 1.184; | 47-49; | EF_HAND_2 11-78; |
| | | | 54-61, 1.096; | CK2_PHOSPHO_SITE | S100_CABP 57-78; |
| | | | | 29-32; | S_100 4-47; |
| | | | | CK2_PHOSPHO_SITE | |
| | | | | 19-22; | |
| | | | | CK2_PHOSPHO_SITE | |
| | | | | 47-50; | |
| | | | | CK2_PHOSPHO_SITE | |
| | | | | 2-5; | |
| DEX0477_067.orf.1 | N | 1 - i1-22; | | MYRISTYL 84-89; | sp_P25815_S10E_HUMAN |
| | | tm23-45; | | CK2_PHOSPHO_SITE | 96-160; EF_HAND_2 |
| | | o46-184; | | 91-94; | 100-167; EFh 142-170; |
| | | | | CK2_PHOSPHO_SITE | efhand 142-170; |
| | | | | 118-121; MYRISTYL | S_100 93-136; |
| | | | | 83-88; | S100_CABP 146-167; |
| | | | | CK2_PHOSPHO_SITE | |
| | | | | 136-139; | |
| | | | | PKC_PHOSPHO_SITE | |
| | | | | 74-76; | |
| | | | | PKC_PHOSPHO_SITE | |
| | | | | 136-138; MYRISTYL | |
| | | | | 69-74; | |
| | | | | CK2_PHOSPHO_SITE | |
| | | | | 56-59; MYRISTYL | |
| | | | | 112-117; MYRISTYL | |
| | | | | 8-13; | |
| | | | | PKC_PHOSPHO_SITE | |
| | | | | 16-18; | |
| | | | | CK2_PHOSPHO_SITE | |
| | | | | 108-111; | |
| | | | | CK2_PHOSPHO_SITE | |
| | | | | 89-92; MYRISTYL | |
| | | | | 109-114; | |
| DEX0477_068.aa.1 | N | 0 - i1-64; | 30-39, 1.114; | CAMP_PHOSPHO_SITE | |
| | | | 16-22, 1.026; | 14-17; MYRISTYL | |
| | | | | 12-17; | |
| | | | | PKC_PHOSPHO_SITE | |
| | | | | 24-26; | |
| DEX0477_068.orf.1 | N | 0 - i1-51; | | TYR_PHOSPHO_SITE | |
| | | | | 12-19; MYRISTYL | |
| | | | | 17-22; | |
| DEX0477_069.aa.1 | Y | 0 - o1-140; | 61-80, 1.167; | PKC_PHOSPHO_SITE | CHROMOGRANIN 101-116; |
| | | | 33-54, 1.1; | 126-128; | CHROMOGRANIN |
| | | | 13-18, 1.07; | CK2_PHOSPHO_SITE | 86-101; GRANINS_2 |
| | | | 4-9, 1.09; 92-122, 1.173; | 136-139; MYRISTYL | 95-116; |
| | | | | 30-35; RGD 20-22; | |
| | | | | CAMP_PHOSPHO_SITE | |
| | | | | 123-126; | |
| | | | | PKC_PHOSPHO_SITE | |
| | | | | 122-124; | |
| DEX0477_070.aa.1 | N | 0 - o1-141; | 5-13, 1.12; | CK2_PHOSPHO_SITE | 1433_2 94-113; |
| | | | 71-77, 1.046; | 77-80; | 14_3_3 1-125; 14-3- |
| | | | 132-138, | ASN_GLYCOSYLATION | 3 1-119; |
| | | | 1.159; | 107-110; | sp_P29361_143Z_SHEEP |
| | | | 46-65, 1.15; | CK2_PHOSPHO_SITE | |
| | | | | 88-91; | |
| | | | | CK2_PHOSPHO_SITE | |
| | | | | 115-118; | |
| | | | | CK2_PHOSPHO_SITE | |
| | | | | 39-42; | |
| | | | | CK2_PHOSPHO_SITE | |
| | | | | 93-96; MYRISTYL | |
| | | | | 52-57; | |
| | | | | PKC_PHOSPHO_SITE | |
| | | | | 93-95; MYRISTYL | |
| | | | | 125-130; | |
| | | | | ASN_GLYCOSYLATION | |
| | | | | 56-59; | |
| | | | | PKC_PHOSPHO_SITE | |
| | | | | 39-41; | |
| DEX0477_070.orf.1 | N | 0 - o1-122; | | MYRISTYL 117-122; | 14_3_3 1-122; |
| | | | | PKC_PHOSPHO_SITE | sp_P29312_143Z_HUMAN |
| | | | | 82-84; | 7-122; |
| | | | | PKC_PHOSPHO_SITE | |
| | | | | 117-119; MYRISTYL | |
| | | | | 95-100; | |
| | | | | ASN_GLYCOSYLATION | |
| | | | | 31-34; | |
| | | | | CK2_PHOSPHO_SITE | |
| | | | | 33-36; | |
| | | | | CK2_PHOSPHO_SITE | |
| | | | | 82-85; | |
| | | | | TYR_PHOSPHO_SITE | |
| | | | | 77-83; | |
| | | | | ASN_GLYCOSYLATION | |
| | | | | 99-102; | |
| | | | | CK2_PHOSPHO_SITE | |
| | | | | 117-120; | |
| | | | | TYR_PHOSPHO_SITE | |
| | | | | 43-51; | |
| | | | | PKC_PHOSPHO_SITE | |
| | | | | 23-25; | |
| DEX0477_071.aa.1 | N | 0 - i1-51; | | PKC_PHOSPHO_SITE | |
| | | | | 11-13; AMIDATION | |
| | | | | 2-5; | |
| | | | | PKC_PHOSPHO_SITE | |
| | | | | 22-24; | |
| | | | | CAMP_PHOSPHO_SITE | |
| | | | | 5-8; | |
| DEX0477_071.orf.1 | N | 0 - i1-90; | | CAMP_PHOSPHO_SITE | DSS1_SEM1 23-83; |
| | | | | 5-8; AMIDATION 2-5; | |
| | | | | PKC_PHOSPHO_SITE | |
| | | | | 22-24; | |
| | | | | TYR_PHOSPHO_SITE | |
| | | | | 77-85; | |
| | | | | PKC_PHOSPHO_SITE | |
| | | | | 11-13; | |
| DEX0477_071.aa.2 | N | 0 - i1-44; | 36-41, 1.019; | MYRISTYL 21-26; | |
| | | | 25-31, 1.088; | MYRISTYL 30-35; | |
| | | | | CAMP_PHOSPHO_SITE | |
| | | | | 40-43; MYRISTYL | |
| | | | | 9-14; | |
| | | | | ASN_GLYCOSYLATION | |
| | | | | 23-26; | |
| | | | | PKC_PHOSPHO_SITE | |
| | | | | 15-17; | |
| | | | | PKC_PHOSPHO_SITE | |
| | | | | 42-44; MYRISTYL | |
| | | | | 34-39; | |
| DEX0477_071.orf.2 | Y | 0 - i1-88; | | MYRISTYL 44-49; | |
| | | | | MYRISTYL 74-79; | |
| | | | | MYRISTYL 49-54; | |
| | | | | MYRISTYL 67-72; | |
| | | | | PKC_PHOSPHO_SITE | |
| | | | | 17-19; MYRISTYL | |
| | | | | 48-53; MYRISTYL | |
| | | | | 58-63; | |
| | | | | ASN_GLYCOSYLATION | |
| | | | | 77-80; | |
| DEX0477_072.aa.1 | N | 0 - o1-680; | 431-436, | PKC_PHOSPHO_SITE | ATP_GTP_A 45-52; |
| | | | 1.046; 9-15, | 203-205; | GLN_RICH 596-668; |
| | | | 1.083; 65-74, | CK2_PHOSPHO_SITE | GBP 6-280; GBP_C |
| | | | 1.122; | 303-306; | 282-567; |
| | | | 455-478, 1.14; | CK2_PHOSPHO_SITE | PRENYLATION 677-680; |
| | | | 138-146, | 481-484; | |
| | | | 1.112; | CK2_PHOSPHO_SITE | |
| | | | 595-601, | 347-350; | |
| | | | 1.069; | CK2_PHOSPHO_SITE | |
| | | | 304-318, | 195-198; | |
| | | | 1.156; | PKC_PHOSPHO_SITE | |
| | | | 646-653, | 49-51; MYRISTYL | |
| | | | 1.047; | 555-560; | |
| | | | 512-519, | PKC_PHOSPHO_SITE | |
| | | | 1.057; | 179-181; | |
| | | | 401-419, | CK2_PHOSPHO_SITE | |
| | | | 1.154; | 384-387; | |
| | | | 523-543, | CAMP_PHOSPHO_SITE | |
| | | | 1.172; | 499-502; | |
| | | | 657-669, | CK2_PHOSPHO_SITE | |
| | | | 1.105; | 179-182; | |
| | | | 382-388, | ASN_GLYCOSYLATION | |
| | | | 1.063; | 144-147; | |
| | | | 349-355, | CK2_PHOSPHO_SITE | |
| | | | 1.105; | 370-373; | |
| | | | 571-589, | ASN_GLYCOSYLATION | |
| | | | 1.105; | 657-660; | |
| | | | 28-47, 1.304; | ASN_GLYCOSYLATION | |
| | | | 79-86, 1.153; | 90-93; | |
| | | | 421-428, | CK2_PHOSPHO_SITE | |
| | | | 1.083; | 250-253; | |
| | | | 114-131, | CK2_PHOSPHO_SITE | |
| | | | 1.174; | 358-361; | |
| | | | 292-302, | PKC_PHOSPHO_SITE | |
| | | | 1.159; | 370-372; MYRISTYL | |
| | | | 169-188, | 45-50; | |
| | | | 1.126; | PKC_PHOSPHO_SITE | |
| | | | 338-346, | 358-360; | |
| | | | 346, 1.076; | PKC_PHOSPHO_SITE | |
| | | | 230-251, | 483-485; | |
| | | | 1.132; | ASN_GLYCOSYLATION | |
| | | | 323-334, | 287-290; MYRISTYL | |
| | | | 1.102; | 283-288; | |
| | | | 190-197, | | |
| | | | 1.069; | | |
| | | | 258-274, | | |
| | | | 1.135; | | |
| | | | 148-154, | | |
| | | | 1.074; | | |
| | | | 91-98, 1.145; | | |
| | | | 219-228, | | |
| | | | 1.145; | | |
| DEX0477_072.orf.1 | N | 0 - o1-544; | 361-372, | ASN_GLYCOSYLATION | GBP_C 320-544; GBP |
| | | | 1.102; | 182-185; | 44-318; ATP_GTP_A |
| | | | 342-356, | CK2_PHOSPHO_SITE | 83-90; |
| | | | 1.156; | 396-399; | |
| | | | 129-136, | ASN_GLYCOSYLATION | |
| | | | 1.145; | 325-328; | |
| | | | 228-235, | PKC_PHOSPHO_SITE | |
| | | | 1.069; | 217-219; | |
| | | | 117-124, | CK2_PHOSPHO_SITE | |
| | | | 1.153; | 422-425; | |
| | | | 469-474, | CK2_PHOSPHO_SITE | |
| | | | 1.046; | 385-388; | |
| | | | 186-192, | PKC_PHOSPHO_SITE | |
| | | | 1.074; | 408-410; | |
| | | | 207-226, | CK2_PHOSPHO_SITE | |
| | | | 1.126; | 217-220; | |
| | | | 152-169, | CK2_PHOSPHO_SITE | |
| | | | 1.174; | 288-291; | |
| | | | 47-53, 1.083; | PKC_PHOSPHO_SITE | |
| | | | 330-340, | 11-13; | |
| | | | 1.159; | ASN_GLYCOSYLATION | |
| | | | 387-393, | 27-30; MYRISTYL | |
| | | | 1.105; | 321-326; | |
| | | | 268-289, | PKC_PHOSPHO_SITE | |
| | | | 1.132; 4-21, | 396-398; | |
| | | | 1.112; | CAMP_PHOSPHO_SITE | |
| | | | 420-426, | 537-540; | |
| | | | 1.063; | PKC_PHOSPHO_SITE | |
| | | | 103-112, | 241-243; | |
| | | | 1.122; | CK2_PHOSPHO_SITE | |
| | | | 257-266, | 408-411; | |
| | | | 1.145; | CK2_PHOSPHO_SITE | |
| | | | 439-457, | 233-236; | |
| | | | 1.154; | ASN_GLYCOSYLATION | |
| | | | 176-184, | 128-131; MYRISTYL | |
| | | | 1.112; | 83-88; MYRISTYL | |
| | | | 459-466, | 24-29; | |
| | | | 1.083; | PKC_PHOSPHO_SITE | |
| | | | 493-516, 1.14; | 3-5; | |
| | | | 66-85, 1.304; | PKC_PHOSPHO_SITE | |
| | | | 376-384, | 521-523; | |
| | | | 1.076; | CK2_PHOSPHO_SITE | |
| | | | 296-312, | 341-344; | |
| | | | 1.135; | PKC_PHOSPHO_SITE | |
| | | | 38-44, 1.037; | 87-89; | |
| | | | | CK2_PHOSPHO_SITE | |
| | | | | 519-522; | |
| DEX0477_072.aa.2 | N | 0 - o1-487; | 464-476, | CK2_PHOSPHO_SITE | GBP 1-181; |
| | | | 1.105; | 259-262; | PRENYLATION 484-487; |
| | | | 91-98, 1.069; | CK2_PHOSPHO_SITE | GBP_C 183-475; |
| | | | 4-10, 1.202; | 271-274; | GLN_RICH 403-475; |
| | | | 402-408, | ASN_GLYCOSYLATION | |
| | | | 1.069; | 464-467; MYRISTYL | |
| | | | 131-152, | 184-189; | |
| | | | 1.132; | ASN_GLYCOSYLATION | |
| | | | 453-460, | 188-191; | |
| | | | 1.047; | CK2_PHOSPHO_SITE | |
| | | | 39-47, 1.112; | 382-385; | |
| | | | 302-320, | PKC_PHOSPHO_SITE | |
| | | | 1.154; | 80-82; | |
| | | | 250-256, | CK2_PHOSPHO_SITE | |
| | | | 1.105; | 248-251; | |
| | | | 159-175, | PKC_PHOSPHO_SITE | |
| | | | 1.135; | 104-106; | |
| | | | 332-337, | PKC_PHOSPHO_SITE | |
| | | | 1.046; | 384-386; | |
| | | | 283-289, | CK2_PHOSPHO_SITE | |
| | | | 1.063; | 80-83; | |
| | | | 356-379, 1.14; | ASN_GLYCOSYLATION | |
| | | | 390-396, | 45-48; | |
| | | | 1.053; | CK2_PHOSPHO_SITE | |
| | | | 70-89, 1.126; | 96-99; | |
| | | | 205-219, | CK2_PHOSPHO_SITE | |
| | | | 1.156; | 204-207; | |
| | | | 120-129, | CK2_PHOSPHO_SITE | |
| | | | 1.145; | 14-17; | |
| | | | 49-55, 1.074; | CK2_PHOSPHO_SITE | |
| | | | 224-235, | 285-288; | |
| | | | 1.102; | PKC_PHOSPHO_SITE | |
| | | | 193-203, | 271-273; | |
| | | | 1.159; | PKC_PHOSPHO_SITE | |
| | | | 322-329, | 259-261; | |
| | | | 1.083; | CK2_PHOSPHO_SITE | |
| | | | 239-247, | 151-154; | |
| | | | 1.076; | | |
| DEX0477_072.orf.2 | N | 0 - o1-472; | 341-364, 1.14; | PKC_PHOSPHO_SITE | PRENYLATION 469-472; |
| | | | 55-74, 1.126; | 256-258; | GBP 2-166; |
| | | | 34-40, 1.074; | PKC_PHOSPHO_SITE | GBP_C 168-460; |
| | | | 116-137, | 369-371; | GLN_RICH 388-460; |
| | | | 1.132; | ASN_GLYCOSYLATION | |
| | | | 76-83, 1.069; | 30-33; | |
| | | | 438-445, | CK2_PHOSPHO_SITE | |
| | | | 1.047; | 136-139; | |
| | | | 449-461, | PKC_PHOSPHO_SITE | |
| | | | 1.105; | 89-91; | |
| | | | 307-314, | CK2_PHOSPHO_SITE | |
| | | | 1.083; | 81-84; | |
| | | | 268-274, | ASN_GLYCOSYLATION | |
| | | | 1.063; | 449-452; | |
| | | | 105-114, | CK2_PHOSPHO_SITE | |
| | | | 1.145; | 233-236; | |
| | | | 317-322, | CK2_PHOSPHO_SITE | |
| | | | 1.046; | 244-247; | |
| | | | 209-220, | CK2_PHOSPHO_SITE | |
| | | | 1.102; | 367-370; | |
| | | | 178-188, | PKC_PHOSPHO_SITE | |
| | | | 1.159; | 65-67; | |
| | | | 190-204, | CK2_PHOSPHO_SITE | |
| | | | 1.156; | 256-259; | |
| | | | 224-232, | CK2_PHOSPHO_SITE | |
| | | | 1.076; | 270-273; | |
| | | | 235-241, | CK2_PHOSPHO_SITE | |
| | | | 1.105; | 189-192; | |
| | | | 375-381, | ASN_GLYCOSYLATION | |
| | | | 1.053; | 173-176; | |
| | | | 287-305, | PKC_PHOSPHO_SITE | |
| | | | 1.154; | 244-246; | |
| | | | 144-160, | CK2_PHOSPHO_SITE | |
| | | | 1.135; | 65-68; MYRISTYL | |
| | | | 387-393, | 169-174; | |
| | | | 1.069; | | |
| | | | 24-32, 1.112; | | |
| DEX0477_073.aa.1 | Y | 5 - i1-24; | 264-288, | PKC_PHOSPHO_SITE | KCHANNEL 234-256; |
| | | tm25-47; | 1.254; | 329-331; MYRISTYL | KCHANNEL 263-289; |
| | | o48-56; | 315-321, | 146-151; MYRISTYL | CaMBD 304-369; |
| | | tm57-79; | 1.094; | 274-279; | CHANNEL_PORE_K 232-289; |
| | | i80-206; | 95-103, 1.053; | PKC_PHOSPHO_SITE | SK_channel 11-129; |
| | | tm207-226; | 105-139, | 178-180; | |
| | | o227-240; | 1.273; | LEUCINE_ZIPPER | |
| | | tm241-263; | 295-300, | 18-39; MYRISTYL | |
| | | i264-264; | 1.053; | 34-39; | |
| | | tm265-287; | 342-382, | CK2_PHOSPHO_SITE | |
| | | o288-401; | 1.308; | 224-227; MYRISTYL | |
| | | | 384-397, | 371-376; MYRISTYL | |
| | | | 1.153; | 172-177; | |
| | | | 26-34, 1.113; | CAMP_PHOSPHO_SITE | |
| | | | 4-12, 1.135; | 331-334; MYRISTYL | |
| | | | 238-259, | 51-56; MYRISTYL | |
| | | | 1.124; | 259-264; | |
| | | | 49-87, 1.278; | ASN_GLYCOSYLATION | |
| | | | 38-46, 1.12; | 232-235; | |
| | | | 147-198, | PKC_PHOSPHO_SITE | |
| | | | 1.202; | 398-400; | |
| | | | 205-234, 1.15; | ASN_GLYCOSYLATION | |
| | | | | 176-179; MYRISTYL | |
| | | | | 214-219; MYRISTYL | |
| | | | | 132-137; | |
| | | | | PKC_PHOSPHO_SITE | |
| | | | | 101-103; MYRISTYL | |
| | | | | 210-215; | |
| DEX0477_073.aa.2 | Y | 0 - o1-134; | 32-79, 1.266; | TYR_PHOSPHO_SITE | |
| | | | 8-16, 1.106; | 122-130; | |
| | | | 82-122, 1.247; | CK2_PHOSPHO_SITE | |
| | | | | 26-29; | |
| | | | | PKC_PHOSPHO_SITE | |
| | | | | 21-23; | |
| | | | | CK2_PHOSPHO_SITE | |
| | | | | 123-126; MYRISTYL | |
| | | | | 17-22; | |
| DEX0477_073.orf.2 | N | 0 - o1-161; | 35-43, 1.106; | PKC_PHOSPHO_SITE | |
| | | | 59-106, 1.266; | 48-50; | |
| | | | 16-21, 1.051; | CK2_PHOSPHO_SITE | |
| | | | 109-149, | 53-56; AMIDATION | |
| | | | 1.247; | 5-8; | |
| | | | | CAMP_PHOSPHO_SITE | |
| | | | | 7-10; | |
| | | | | CAMP_PHOSPHO_SITE | |
| | | | | 12-15; MYRISTYL | |
| | | | | 44-49; | |
| | | | | TYR_PHOSPHO_SITE | |
| | | | | 149-157; | |
| | | | | PKC_PHOSPHO_SITE | |
| | | | | 10-12; | |
| | | | | CK2_PHOSPHO_SITE | |
| | | | | 150-153; | |
| DEX0477_074.aa.1 | Y | 5 - i1-24; | 105-139, | CAMP_PHOSPHO_SITE | CaMBD 304-377; |
| | | tm25-47; | 1.273; | 331-334; | KCHANNEL 263-289; |
| | | o48-56; | 26-34, 1.113; | PKC_PHOSPHO_SITE | SK_channel 11-129; |
| | | tm57-79; | 49-87, 1.278; | 329-331; | KCHANNEL 234-256; |
| | | i80-206; | 374-394, | LEUCINE_ZIPPER | CHANNEL_PORE_K 232-289; |
| | | tm207-226; | 1.101; | 378-399; | |
| | | o227-240; | 315-321, | LEUCINE_ZIPPER | |
| | | tm241-263; | 1.094; | 18-39; MYRISTYL | |
| | | i264-264; | 264-288, | 51-56; MYRISTYL | |
| | | tm265-287; | 1.254; | 274-279; | |
| | | o288-427; | 38-46, 1.12; | LEUCINE_ZIPPER | |
| | | | 397-417, | 385-406; MYRISTYL | |
| | | | 1.087; 4-12, | 132-137; | |
| | | | 1.135; | PKC_PHOSPHO_SITE | |
| | | | 295-300, | 101-103; | |
| | | | 1.053; | PKC_PHOSPHO_SITE | |
| | | | 205-234, 1.15; | 178-180; MYRISTYL | |
| | | | 147-198, | 146-151; MYRISTYL | |
| | | | 1.202; | 34-39; MYRISTYL | |
| | | | 342-359, | 214-219; | |
| | | | 1.089; | ASN_GLYCOSYLATION | |
| | | | 238-259, | 384-387; | |
| | | | 1.124; | PKC_PHOSPHO_SITE | |
| | | | 95-103, | 388-390; MYRISTYL | |
| | | | 1.053; | 210-215; | |
| | | | | ASN_GLYCOSYLATION | |
| | | | | 232-235; | |
| | | | | CK2_PHOSPHO_SITE | |
| | | | | 224-227; MYRISTYL | |
| | | | | 172-177; MYRISTYL | |
| | | | | 259-264; | |
| | | | | ASN_GLYCOSYLATION | |
| | | | | 176-179; | |
| | | | | CK2_PHOSPHO_SITE | |
| | | | | 367-370; | |
| DEX0477_075.aa.1 | N | 0 - i1-66; | 4-11, 1.101; | MYRISTYL 50-55; | UBIQUITIN_2 15-66; |
| | | | 54-63, 1.177; | AMIDATION 36-39; | UBIQUITIN 43-64; |
| | | | 28-37, 1.09; | MYRISTYL 10-15; | UBIQUITIN 22-42; |
| DEX0477_075.orf.1 | N | 0 - i1-74; | | PKC_PHOSPHO_SITE | |
| | | | | 11-13; | |
| | | | | CK2_PHOSPHO_SITE | |
| | | | | 62-65; MYRISTYL | |
| | | | | 44-49; | |
| | | | | ASN_GLYCOSYLATION | |
| | | | | 61-64; | |
| | | | | LEUCINE_ZIPPER | |
| | | | | 20-41; | |
| | | | | CK2_PHOSPHO_SITE | |
| | | | | 63-66; | |
| DEX0477_076.aa.1 | N | 1 - o1-385; | 141-156, | CK2_PHOSPHO_SITE | EGF 140-173; |
| | | tm386-408; | 1.142; | 494-497; | EGF_CA_2_2 137-173; |
| | | i409-535; | 350-358; | CK2_PHOSPHO_SITE | EGF_CA 137-173; EGF |
| | | | 1.106; | 151-154; | 141-172; CYS_RICH |
| | | | 122-129, 1.12; | PKC_PHOSPHO_SITE | 65-253; EGF 65-96; |
| | | | 62-70, 1.155; | 349-351; | EGF_2_DOMAIN_3 141-172; |
| | | | 293-300, | ASN_GLYCOSYLATION | EGFBLOOD 157-167; |
| | | | 1.094; | 62-65; MYRISTYL | EGF 103-134; |
| | | | 306-322, | 9-14; | EGFBLOOD 149-156; |
| | | | 1.159; | ASN_GLYCOSYLATION | EGF_2_DOMAIN_1 65-96; |
| | | | 93-98, 1.062; | 277-280; | EGF_1 161-172; |
| | | | 364-377, | ASN_GLYCOSYLATION | ASX_HYDROXYL 152-163; |
| | | | 1.143; 5-11, | 381-384; | EGF_CA_2_1 99-135; |
| | | | 1.077; | ASN_GLYCOSYLATION | EGF 64-97; EGF |
| | | | 488-496, | 512-515; | 102-135; EGFLAMININ |
| | | | 1.121; | ASN_GLYCOSYLATION | 78-96; EGF_CA 99-135; |
| | | | 131-136, | 362-365; MYRISTYL | ASX_HYDROXYL |
| | | | 1.044; | 50-55; | 114-125; EGFBLOOD |
| | | | 328-335, | TYR_PHOSPHO_SITE | 99-110; EGF_CA 65-97; |
| | | | 1.133; | 264-271; MYRISTYL | EGF_2 85-96; |
| | | | 103-117, | 54-59; | EGF_1 85-96; EGF_CA |
| | | | 1.176; | PKC_PHOSPHO_SITE | 99-123; |
| | | | 384-412, | 357-359; | EGF_2_DOMAIN_2 103-134; |
| | | | 1.226; | ASN_GLYCOSYLATION | EGF_1 123-134; |
| | | | 83-89, 1.164; | 427-430; | VWC 180-247; EGF_CA |
| | | | 448-454, | PKC_PHOSPHO_SITE | 137-161; EGFLAMININ |
| | | | 1.066; | 514-516; | 154-172; EGFLAMININ |
| | | | 169-189, 1.11; | PKC_PHOSPHO_SITE | 116-134; VWC_out |
| | | | 24-49, 1.257; | 176-178; | 180-247; EGF_2 123-134; |
| | | | 72-80, 1.099; | CK2_PHOSPHO_SITE | |
| | | | 197-264, | 422-425; | |
| | | | 1.212; | CK2_PHOSPHO_SITE | |
| | | | 158-167, | 357-360; | |
| | | | 1.196; | CK2_PHOSPHO_SITE | |
| | | | | 334-337; | |
| | | | | ASN_GLYCOSYLATION | |
| | | | | 308-311; MYRISTYL | |
| | | | | 249-254; | |
| | | | | CK2_PHOSPHO_SITE | |
| | | | | 471-474; | |
| | | | | CK2_PHOSPHO_SITE | |
| | | | | 113-116; | |
| DEX0477_077.aa.1 | N | 0 - o1-209; | 18-26, 1.117; | PKC_PHOSPHO_SITE | hemopexin 68-112; |
| | | | 111-120, | 12-14; MYRISTYL | hemopexin 166-206; |
| | | | 1.081; | 67-72; | HX 166-206; HX 117-164; |
| | | | 49-63, 1.109; | PKC_PHOSPHO_SITE | HX 68-112; |
| | | | 88-109, 1.11; | 126-128; | HEMOPEXIN 57-72; |
| | | | 175-180, | TYR_PHOSPHO_SITE | hemopexin 117-164; |
| | | | 1.072; 4-9, | 144-151; | |
| | | | 1.108; 28-41, | PKC_PHOSPHO_SITE | |
| | | | 1.191; | 191-193; | |
| | | | 130-136, 1.09; | PKC_PHOSPHO_SITE | |
| | | | 152-172, | 113-115; | |
| | | | 1.117; | | |
| DEX0477_078.aa.1 | N | 0 - o1-640; | 265-271, | MYRISTYL 432-437; | Collagen 213-272; |
| | | | 1.001; | PKC_PHOSPHO_SITE | GLY_RICH 3-474; |
| | | | 543-555, | 479-481; MYRISTYL | Collagen 333-392; |
| | | | 1.081; | 84-89; MYRISTYL | Collagen 153-212; |
| | | | 507-532, | 63-68; MYRISTYL | Collagen 273-332; |
| | | | 1.071; | 60-65; | Collagen 393-452; |
| | | | 473-478, | PKC_PHOSPHO_SITE | COLFI 515-639; |
| | | | 1.017; | 492-494; MYRISTYL | Collagen 33-92; |
| | | | 424-434, | 54-59; | COLLAGEN_REP 2-476; |
| | | | 1.063; | PKC_PHOSPHO_SITE | Collagen 93-152; |
| | | | 374-383, | 299-301; MYRISTYL | PRO_RICH 71-455; |
| | | | 1.049; | 408-413; MYRISTYL | COLFI 532-640; |
| | | | 482-492, 1.11; | 51-56; MYRISTYL | sp_O76045_O76045_HUMAN |
| | | | 449-458, 1.01; | 147-152; MYRISTYL | 532-640; |
| | | | 193-199, | 282-287; | |
| | | | 1.068; | PKC_PHOSPHO_SITE | |
| | | | 140-149, | 538-540; | |
| | | | 1.049; | CK2_PHOSPHO_SITE | |
| | | | 630-637, | 545-548; | |
| | | | 1.106; | CK2_PHOSPHO_SITE | |
| | | | 112-125, | 616-619; MYRISTYL | |
| | | | 1.022; | 195-200; | |
| | | | 313-319, | PKC_PHOSPHO_SITE | |
| | | | 1.025; | 521-523; MYRISTYL | |
| | | | 608-614, 1.03; | 496-501; MYRISTYL | |
| | | | 89-97, 1.048; | 129-134; | |
| | | | 566-579, | CK2_PHOSPHO_SITE | |
| | | | 1.128; | 492-495; MYRISTYL | |
| | | | 71-77, 1.01; | 386-391; MYRISTYL | |
| | | | 215-220, | 165-170; | |
| | | | 1.009; | PKC_PHOSPHO_SITE | |
| | | | 620-627, | 545-547; MYRISTYL | |
| | | | 1.023; | 57-62; MYRISTYL | |
| | | | 50-56, 1.036; | 381-386; MYRISTYL | |
| | | | 584-598, | 96-101; | |
| | | | 1.144; | CK2_PHOSPHO_SITE | |
| | | | 460-465, | 208-211; MYRISTYL | |
| | | | 1.014; | 444-449; MYRISTYL | |
| | | | | 365-370; MYRISTYL | |
| | | | | 216-221; MYRISTYL | |
| | | | | 474-479; | |
| | | | | CK2_PHOSPHO_SITE | |
| | | | | 295-298; | |
| DEX0477_078.orf.1 | N | 0 - o1-567; | 535-554, 1.11; | MYRISTYL 209-214; | Collagen 395-454; |
| | | | 510-520, 1.01; | PKC_PHOSPHO_SITE | Collagen 155-214; |
| | | | 202-211, | 541-543; MYRISTYL | Collagen 335-394; |
| | | | 1.049; 9-27, | 227-232; MYRISTYL | Collagen 215-274; |
| | | | 1.022; 45-60, | 158-163; | Collagen 2-61; |
| | | | 1.049; | PKC_PHOSPHO_SITE | Collagen 275-334; |
| | | | 151-159, | 34-36; MYRISTYL | COLLAGEN_REP 2-538; |
| | | | 1.048; | 278-283; | Collagen 455-514; |
| | | | 436-445, | PKC_PHOSPHO_SITE | Collagen 95-154; |
| | | | 1.049; | 361-363; MYRISTYL | GLY_RICH 2-536; |
| | | | 375-381, | 125-130; | PRO_RICH 3-517; |
| | | | 1.025; | PKC_PHOSPHO_SITE | |
| | | | 327-333, | 554-556; | |
| | | | 1.001; | CK2_PHOSPHO_SITE | |
| | | | 522-528, | 554-557; MYRISTYL | |
| | | | 1.014; | 146-151; MYRISTYL | |
| | | | 253-261, | 257-262; MYRISTYL | |
| | | | 1.068; | 448-453; MYRISTYL | |
| | | | 276-282, | 113-118; MYRISTYL | |
| | | | 1.009; | 470-475; MYRISTYL | |
| | | | 141-148, | 122-127; MYRISTYL | |
| | | | 1.006; | 119-124; MYRISTYL | |
| | | | 132-139, 1.01; | 116-121; MYRISTYL | |
| | | | 174-187, | 443-448; MYRISTYL | |
| | | | 1.022; | 427-432; MYRISTYL | |
| | | | 112-118, | 344-349; MYRISTYL | |
| | | | 1.036; | 494-499; | |
| | | | 352-357, | CK2_PHOSPHO_SITE | |
| | | | 0.995; | 357-360; MYRISTYL | |
| | | | 486-496, | 506-511; MYRISTYL | |
| | | | 1.063; | 191-196; | |
| | | | | CK2_PHOSPHO_SITE | |
| | | | | 270-273; MYRISTYL | |
| | | | | 536-541; | |
| DEX0477_079.aa.1 | N | 0 - o1-156; | 128-136, | CK2_PHOSPHO_SITE | sp_P06733_ENOA_HUMAN |
| | | | 1.068; 4-15, | 71-74; | 11-153; enolase |
| | | | 1.133; 32-42, | CK2_PHOSPHO_SITE | 1-154; ENOLASE 91-108; |
| | | | 1.126; 56-82, | 13-16; MYRISTYL | ENOLASE 62-76; |
| | | | 1.195; | 88-93; | ENOLASE 39-50; |
| | | | 117-124, | PKC_PHOSPHO_SITE | ENOLASE 62-75; |
| | | | 1.058; | 123-125; MYRISTYL | |
| | | | 88-94, 1.085; | 9-14; MYRISTYL | |
| | | | 103-114, | 113-118; MYRISTYL | |
| | | | 1.209; | 109-114; | |
| | | | | PKC_PHOSPHO_SITE | |
| | | | | 92-94; | |
| DEX0477_080.aa.1 | Y | 0 - o1-108; | 17-44, 1.198; | PKC_PHOSPHO_SITE | |
| | | | 47-57, 1.111; | 40-42; MYRISTYL | |
| | | | 7-15, 1.078; | 36-41; | |
| | | | 59-102, 1.191; | PKC_PHOSPHO_SITE | |
| | | | | 11-13; | |
| | | | | PKC_PHOSPHO_SITE | |
| | | | | 101-103; | |
| | | | | PKC_PHOSPHO_SITE | |
| | | | | 95-97; MYRISTYL | |
| | | | | 37-42; | |
| DEX0477_080.orf.1 | N | 0 - o1-125; | 56-66, 1.095; | MYRISTYL 26-31; | |
| | | | 24-33, 1.111; | MYRISTYL 37-42; | |
| | | | 74-84, 1.122; | PKC_PHOSPHO_SITE | |
| | | | 40-46, 1.088; | 67-69; | |
| | | | 15-20, 1.064; | PKC_PHOSPHO_SITE | |
| | | | 90-122, 1.285; | 122-124; MYRISTYL | |
| | | | | 16-21; MYRISTYL | |
| | | | | 35-40; MYRISTYL | |
| | | | | 1-6; MYRISTYL 12-17; | |
| | | | | MYRISTYL 13-18; | |
| | | | | CK2_PHOSPHO_SITE | |
| | | | | 6-9; | |

DEX0477_{—}001.nt.1 (Pro108) Splice Variants

[0548] Pro108 was previously identified wholly or in part as Cancer specific gene Pro108 cDNA in WO200023108-A1; Human PRO866 nucleotide sequence in WO9946281-A2; Human bone remodelling gene #127 in US6426186-Bland Human polynucleotide SEQ ID NO 231 in WO200153312-A1 which are herein incorporated by reference.

[0549] Pro108 is related to Homo sapiens spondin 2, extracellular matrix protein (SPON2), mRNA (RefSeq ID: NM_{—}012445.1). Manda R. et al, Genomics 61:5-14 (1999).

[0550] Splice variants have been identified for Pro108 using the methods described above. They include: DEX0477_{—}001.nt.2, DEX0477_{—}001.nt.4, DEX0477_{—}001.nt.5, DEX0477_{—}001.nt.6, DEX0477_{—}001.nt.7, DEX0477_{—}001.nt.8, DEX0477_{—}002.nt.1, DEX0477_{—}002.nt.2 and DEX0477_{—}001.nt.9. These transcripts arise from alternative splicing events in the same genomic region as Pro108 and contain exons encoding amino acid sequences. These amino acid sequences provide proteins to be targeted for the generation of reagents that can be used in the detection and/or treatment of cancer. The nucleotide sequences in these exons can be used as a nucleic acid probe for the diagnosis and/or treatment of cancer.

[0551] DEX0477_{—}001.nt.2 (Pro177) Splice Variant

[0552] Pro177, also known as Pro108v1, is a protein encoding sequence splice variant containing exons that distinguish it from Pro108. An alignment of the DNA sequences for DEX0477_{—}001.nt.1 (Pro 108) and DEX0477_{—}001.nt.2 (Pro 177) is provided in FIG. 3.

[0553] Pro177 encodes an amino acid sequence DEX0477_{—}001.aa.3 which comprises insertions and deletions that distinguish it from DEX0477_{—}001.aa.1 (Pro108.aa). An alignment of the protein sequences for DEX0477_{—}001.aa.1 (Pro108.aa) and DEX0477_{—}001.aa.3 is provided in FIG. 4.

[0554] Pro177 encodes an alternate amino acid sequence DEX0477_{—}001.aa.2 which comprises insertions and deletions that distinguish it from DEX0477_{—}001.aa.1 (Pro 108.aa). An alignment of the protein sequences for DEX0477_{—}001.aa.1 (Pro108.orf) and DEX0477_{—}001.aa.2 is provided in FIG. 5.

### Example 1b

### Sequence Alignment Support

[0555] Alignments between previously identified sequences and splice variant sequences are performed to confirm unique portions of splice variant nucleic acid and amino acid sequences. The alignments are done using the Needle program in the European Molecular Biology Open Software Suite (EMBOSS) version 2.2.0 available at www.emboss.org from EMBnet (http://www.embnet.org). Default settings are used unless otherwise noted. The Needle program in EMBOSS implements the Needleman-Wunsch algorithm. Needleman, S. B., Wunsch, C. D., J. Mol. Biol. 48:443-453 (1970).

[0556] It is well know to those skilled in the art that implication of alignment algorithms by various programs may result in minor changes in the generated output. These changes include but are not limited to: alignment scores (percent identity, similarity, and gap), display of nonaligned flanking sequence regions, and number assignment to residues. These minor changes in the output of an alignment do not alter the physical characteristics of the sequences or the differences between the sequences, e.g. regions of homology, insertions, or deletions.

### Example 1c

### RT-PCR Analysis

[0557] To detect the presence and tissue distribution of a particular splice variant Reverse Transcription-Polymerase Chain Reaction (RT-PCR) is performed using cDNA generated from a panel of tissue RNAs. See, e.g., Sambrook et al., Molecular Cloning: A Laboratory Manual 2d ed., Cold Spring Harbor Laboratory Press (1989) and; Kawasaki E S et al., PNAS 85(15):5698 (1988). Total RNA is extracted from a variety of tissues and first strand cDNA is prepared with reverse transcriptase (RT). Each panel includes 23 cDNAs from five cancer types (lung, ovary, breast, colon, and prostate) and normal samples of testis, placenta and fetal brain. Each cancer set is composed of three cancer cDNAs from different donors and one normal pooled sample. Using a standard enzyme kit from BD Bioscience Clontech (Mountain View, Calif.), the target transcript is detected with sequence-specific primers designed to only amplify the particular splice variant. The PCR reaction is run on the GeneAmp PCR system 9700 (Applied Biosystem, Foster City, Calif.) thermocycler under optimal conditions. One of ordinary skill can design appropriate primers and determine optimal conditions. The amplified product is resolved on an agarose gel to detect a band of equivalent size to the predicted RT-PCR product. A band indicated the presence of the splice variant in a sample. The relation of the amplified product to the splice variant was subsequently confirmed by DNA sequencing.

[0558] After subcloning, all positively screened clones are sequence verified. The DNA sequence verification results show the splice variant contains the predicted sequence differences in comparison with the reference sequence.

[0559] Results for RT-PCR analysis in the table below include the sequence DEX ID, Lead Name, Cancer Tissue(s) the transcript was detected in, Normal Tissue(s) the transcript was detected in, the predicted length of the RT-PCR product, and the Confirmed Length of the RT-PCR product.

| | Lead | Cancer | Normal | Predicted | Confirmed |
|---|---|---|---|---|---|
| DEX ID | Name | Tissue(s) | Tissue(s) | Length | Length |
| DEX0477_020.nt.1 | Cln224 | Lung, | Colon | 439 bp | 439 bp |
| | | Ovary, Breast, | | | |
| | | Colon and Prostate | | | |
| DEX0477_020.nt.2 | Cln224v1 | Lung, | Colon | 342 bp | 342 bp |
| | | Ovary, Breast, | | | |
| | | Colon and Prostate | | | |

[0560] RT-PCR results confirm the presence SEQ ID NO: 1-141 in biologic samples and distinguish between related transcripts.

### Example 1d

### Secretion Assay

[0561] To determine if a protein encoded by a splice variant is secreted from cells a secretion assay is preformed. A pcDNA3.1 clone containing the gene transcript which encodes the variant protein is transfected into 293T cells using the Superfect transfection reagent (Qiagen, Valencia Calif.). Transfected cells are incubated for 28 hours before the media is collected and immediately spun down to remove any detached cells. The adherent cells are solubilized with lysis buffer (1% NP40, 10 mM sodium phosphate pH7.0, and 0.15M NaCl). The lysed cells are collected and spun down and the supernatant extracted as cell lysate. Western immunoblot is carried out in the following manner: 15 μl of the cell lysate and media are run on 4-12% NuPage Bis-Tris gel (Invitrogen, Carlsbad Calif.), and blotted onto a PVDF membrane (Invitrogen, Carlsbad Calif.). The blot is incubated with a polyclonal primary antibody which binds to the variant protein (Imgenex, San Diego Calif.) and polyclonal goat anti-rabbit-peroxidase secondary antibody (Sigma-Aldrich, St. Louis Mo.). The blot is developed with the ECL Plus chemiluminescent detection reagent (Amersham BioSciences, Piscataway N.J.).

[0562] Secretion assay results are indicative of SEQ ID NO: 142-361 being a diagnostic marker and/or therapeutic target for cancer.

### Example 2a

### Gene Expression Analysis

[0563] Custom Microarray Experiment—Cancer

[0564] Custom oligonucleotide microarrays were provided by Agilent Technologies, Inc. (Palo Alto, Calif.). The microarrays were fabricated by Agilent using their technology for the in-situ synthesis of 60mer oligonucleotides (Hughes, et al. 2001, Nature Biotechnology 19:342-347). The 60mer microarray probes were designed by Agilent, from gene sequences provided by diaDexus, using Agilent proprietary algorithms. Whenever possible two different 60mers were designed for each gene of interest.

[0565] All microarray experiments were two-color experiments and were preformed using Agilent-recommended protocols and reagents. Briefly, each microarray was hybridized with cRNAs synthesized from polyA+ RNA, isolated from cancer and normal tissues or cell lines, and labeled with fluorescent dyes Cyanine3 (Cy3) or Cyanine5 (Cy5) (NEN Life Science Products, Inc., Boston, Mass.) using a linear amplification method (Agilent). In each experiment the experimental sample was RNA isolated from cancer tissue from a single individual or cell line and the reference sample was a pool of RNA isolated from normal tissues of the same organ as the cancerous tissue (i.e. normal breast tissue in experiments with breast cancer or cell line samples). Hybridizations were carried out at 60° C., overnight using Agilent in-situ hybridization buffer. Following washing, arrays were scanned with a GenePix 4000B Microarray Scanner (Axon Instruments, Inc., Union City, Calif.). Each array was scanned at two PMT voltages (600 v and 550 v). The resulting images were analyzed with GenePix Pro 3.0 Microarray Acquisition and Analysis Software (Axon). Unless otherwise noted, data reported is from images generated by scanning at PMT of 600 v.

[0566] Data normalization and expression profiling were done with Expressionist software from GeneData Inc. (Daly City, Calif./Basel, Switzerland). Gene expression analysis was performed using only experiments that met certain quality criteria. The quality criteria that experiments must meet are a combination of evaluations performed by the Expressionist software and evaluations performed manually using raw and normalized data. To evaluate raw data quality, detection limits (the mean signal for a replicated negative control+2 Standard Deviations (SD)) for each channel were calculated. The detection limit is a measure of non-specific hybridization. Acceptable detection limits were defined for each dye (<80 for Cy5 and <150 for Cy3). Arrays with poor detection limits in one or both channels were not analyzed and the experiments were repeated. To evaluate normalized data quality, positive control elements included in the array were utilized. These array features should have a mean ratio of 1 (no differential expression). If these features have a mean ratio of greater than 1.5-fold up or down, the experiments were not analyzed further and were repeated. In addition to traditional scatter plots demonstrating the distribution of signal in each experiment, the Expressionist software also has minimum thresholding criteria that employ user defined parameters to identify quality data. These thresholds include two distinct quality measurements: 1) minimum area percentage, which is a measure of the integrity of each spot and 2) signal to noise ratio, which ensures that the signal being measured is significantly above any background (nonspecific) signal present. Only those features that met the threshold criteria were included in the filtering and analyses carried out by Expressionist. The thresholding settings employed require a minimum area percentage of 60% [(% pixels>background+2SD)−(% pixels saturated)], and a minimum signal to noise ratio of 2.0 in both channels. By these criteria, very low expressors, saturated features and spots with abnormally high local background were not included in analysis.

[0567] Relative expression data was collected from Expressionist based on filtering and clustering analyses. Up-regulated genes were identified using criteria for the percentage of experiments in which the gene is up-regulated by at least 2-fold. For cell lines, up-regulated genes were identified using criteria for the percentage of experiments in which the gene is up-regulated by at least 1.8-fold. In general, up-regulation in ˜30% of samples tested was used as a cutoff for filtering.

[0568] Two microarray experiments were preformed for each normal and cancer tissue pair. The tissue specific Array Chip for each cancer tissue is a unique microarray specific to that tissue and cancer. The Multi-Cancer Array Chip is a universal microarray that was hybridized with samples from each of the cancers (ovarian, breast, colon, lung, and prostate). Unless otherwise noted, data reported is from images generated by scanning at PMT of 600v. See the description below for the experiments specific to the different cancers.

Microarray Experiments and Data Tables

[0569] Breast Cancer Chips

[0570] For breast cancer two different chip designs were evaluated with overlapping sets of a total of 36 samples, comparing the expression patterns of breast cancer derived polyA+ RNA to polyA+ RNA isolated from a pool of 10 normal breast tissues. For the Breast Array Chip, all 36 samples (9 stage I cancers, 23 stage II cancers, 4 stage III cancers) were analyzed. These samples also represented 10 Grade1/2 and 26 Grade 3 cancers. The histopathologic grades for cancer are classified as follows: GX, cannot be assessed; G1, well differentiated; G2, moderately differentiated; G3, poorly differentiated; and G4, undifferentiated. AJCC Cancer Staging Handbook, pp. 9, (5th Ed, 1998). Samples were further grouped based on the expression patterns of the known breast cancer associated genes Her2 and ERα (10 HER2 up, 26 HER2 not up, 20 ER up and 16 ER not up). For the Multi-Cancer Array Chip, a subset of 20 of these samples (9 stage I cancers, 8 stage II cancers, 3 stage III cancers) were assessed. In addition to tissue samples, six lung cancer cell lines (DU4475, MCF7, MDAMB231, MDAMB361, MDAMB453, T47D) were analyzed on the Breast Array Chip.

[0571] The results for the statistically significant up-regulated genes on the Breast Array Chip are shown in Table(s) 1-4. The results for the statistically significant up-regulated genes on the Multi-Cancer Array Chip are shown in Table(s) 5-6. The first two columns of each table contain information about the sequence itself (Seq ED, Oligo Name), the next columns show the results obtained for all (“ALL”) breast cancer samples, cancers corresponding to stage I (“ST1”), stages II and III (“ST2,3”), grades 1 and 2 (“GR1,2”), grade 3 (“GR3”), cancers exhibiting up-regulation of Her2 (“HER2up”) or ERα (“ERup”) or those not exhibiting up-regulation of Her2 (“NOT HER2up”) or ERα (“NOT ERup”). ‘% up’ indicates the percentage of all experiments in which up-regulation of at least 2-fold was observed (n=36 for Breast Array Chip, n=20 for the Multi-Cancer Array Chip), ‘% valid up’ indicates the percentage of experiments with valid expression values in which up-regulation of at least 2-fold was observed. For the cell lines, ‘% up’ indicates the percentage of all experiments in which up-regulation of at least 1.8-fold was observed (n=6 for Breast Array Chip), ‘% valid up’ indicates the percentage of experiments with valid expression values in which up-regulation of at least 1.8-fold was observed. Additional experiments were performed, generally the results are only reported below if the data showed 30% or greater up-regulation in at least one of the experimental subsets.

TABLE 1

| | | | Mam | | Mam | | Mam | | Mam | | Mam |
|---|---|---|---|---|---|---|---|---|---|---|---|
| | | Mam | ALL % | Mam | ST1 % | Mam | ST2, 3 % | Mam | GR1, 2 % | Mam | GR3 % |
| | | ALL | valid | ST1 | valid | ST2, 3 | valid | GR1, 2 | valid | GR3 | valid |
| | Oligo | % up | up | % up | up | % up | up | % up | up | % up | up |
| DEX ID | Name | n = 36 | n = 36 | n = 9 | n = 9 | n = 27 | n = 27 | n = 10 | n = 10 | n = 26 | n = 26 |
| DEX0477_005.nt.1 | 15805.0 | 13.9 | 13.9 | 11.1 | 11.1 | 14.8 | 14.8 | 0.0 | 0.0 | 19.2 | 19.2 |
| DEX0477_005.nt.1 | 15806.0 | 25.0 | 25.0 | 22.2 | 22.2 | 25.9 | 25.9 | 0.0 | 0.0 | 34.6 | 34.6 |
| DEX0477_007.nt.1 | 18644.0 | 13.9 | 20.8 | 22.2 | 40.0 | 11.1 | 15.8 | 0.0 | 0.0 | 19.2 | 29.4 |
| DEX0477_007.nt.1 | 18644.2 | 13.9 | 20.0 | 22.2 | 33.3 | 11.1 | 15.8 | 0.0 | 0.0 | 19.2 | 27.8 |
| DEX0477_007.nt.1 | 18645.0 | 13.9 | 22.7 | 22.2 | 50.0 | 11.1 | 16.7 | 0.0 | 0.0 | 19.2 | 31.2 |
| DEX0477_007.nt.1 | 18645.2 | 13.9 | 20.8 | 22.2 | 40.0 | 11.1 | 15.8 | 0.0 | 0.0 | 19.2 | 29.4 |
| DEX0477_010.nt.1 | 15805.0 | 13.9 | 13.9 | 11.1 | 11.1 | 14.8 | 14.8 | 0.0 | 0.0 | 19.2 | 19.2 |
| DEX0477_010.nt.1 | 15806.0 | 25.0 | 25.0 | 22.2 | 22.2 | 25.9 | 25.9 | 0.0 | 0.0 | 34.6 | 34.6 |
| DEX0477_012.nt.1 | 16992.0 | 50.0 | 50.0 | 55.6 | 55.6 | 48.1 | 48.1 | 20.0 | 20.0 | 61.5 | 61.5 |
| DEX0477_012.nt.1 | 20235.0 | 50.0 | 50.0 | 55.6 | 55.6 | 48.1 | 48.1 | 30.0 | 30.0 | 57.7 | 57.7 |
| DEX0477_014.nt.1 | 27949.0 | 13.9 | 33.3 | 11.1 | 25.0 | 14.8 | 36.4 | 0.0 | 0.0 | 19.2 | 55.6 |
| DEX0477_014.nt.2 | 27949.0 | 13.9 | 33.3 | 11.1 | 25.0 | 14.8 | 36.4 | 0.0 | 0.0 | 19.2 | 55.6 |
| DEX0477_014.nt.3 | 27949.0 | 13.9 | 33.3 | 11.1 | 25.0 | 14.8 | 36.4 | 0.0 | 0.0 | 19.2 | 55.6 |
| DEX0477_015.nt.1 | 17244.0 | 16.7 | 17.1 | 22.2 | 22.2 | 14.8 | 15.4 | 40.0 | 44.4 | 7.7 | 7.7 |
| DEX0477_015.nt.1 | 17292.0 | 19.4 | 19.4 | 22.2 | 22.2 | 18.5 | 18.5 | 50.0 | 50.0 | 7.7 | 7.7 |
| DEX0477_015.nt.1 | 20399.0 | 19.4 | 20.0 | 22.2 | 25.0 | 18.5 | 18.5 | 50.0 | 50.0 | 7.7 | 8.0 |
| DEX0477_015.nt.2 | 17244.0 | 16.7 | 17.1 | 22.2 | 22.2 | 14.8 | 15.4 | 40.0 | 44.4 | 7.7 | 7.7 |
| DEX0477_015.nt.2 | 17292.0 | 19.4 | 19.4 | 22.2 | 22.2 | 18.5 | 18.5 | 50.0 | 50.0 | 7.7 | 7.7 |
| DEX0477_015.nt.2 | 20399.0 | 19.4 | 20.0 | 22.2 | 25.0 | 18.5 | 18.5 | 50.0 | 50.0 | 7.7 | 8.0 |
| DEX0477_016.nt.1 | 15232.0 | 25.0 | 29.0 | 11.1 | 16.7 | 29.6 | 32.0 | 30.0 | 37.5 | 23.1 | 26.1 |
| DEX0477_016.nt.1 | 15233.0 | 25.0 | 25.7 | 11.1 | 11.1 | 29.6 | 30.8 | 30.0 | 30.0 | 23.1 | 24.0 |
| DEX0477_016.nt.1 | 33428.0 | 27.8 | 27.8 | 11.1 | 11.1 | 33.3 | 33.3 | 30.0 | 30.0 | 26.9 | 26.9 |
| DEX0477_016.nt.1 | 37143.0 | 27.8 | 27.8 | 11.1 | 11.1 | 33.3 | 33.3 | 30.0 | 30.0 | 26.9 | 26.9 |
| DEX0477_016.nt.1 | 37143.2 | 27.8 | 27.8 | 11.1 | 11.1 | 33.3 | 33.3 | 30.0 | 30.0 | 26.9 | 26.9 |
| DEX0477_016.nt.2 | 15232.0 | 25.0 | 29.0 | 11.1 | 16.7 | 29.6 | 32.0 | 30.0 | 37.5 | 23.1 | 26.1 |
| DEX0477_016.nt.2 | 15233.0 | 25.0 | 25.7 | 11.1 | 11.1 | 29.6 | 30.8 | 30.0 | 30.0 | 23.1 | 24.0 |
| DEX0477_016.nt.2 | 33428.0 | 27.8 | 27.8 | 11.1 | 11.1 | 33.3 | 33.3 | 30.0 | 30.0 | 26.9 | 26.9 |
| DEX0477_016.nt.2 | 37143.0 | 27.8 | 27.8 | 11.1 | 11.1 | 33.3 | 33.3 | 30.0 | 30.0 | 26.9 | 26.9 |
| DEX0477_016.nt.2 | 37143.2 | 27.8 | 27.8 | 11.1 | 11.1 | 33.3 | 33.3 | 30.0 | 30.0 | 26.9 | 26.9 |
| DEX0477_016.nt.4 | 33428.0 | 27.8 | 27.8 | 11.1 | 11.1 | 33.3 | 33.3 | 30.0 | 30.0 | 26.9 | 26.9 |
| DEX0477_016.nt.4 | 37143.0 | 27.8 | 27.8 | 11.1 | 11.1 | 33.3 | 33.3 | 30.0 | 30.0 | 26.9 | 26.9 |
| DEX0477_016.nt.4 | 37143.2 | 27.8 | 27.8 | 11.1 | 11.1 | 33.3 | 33.3 | 30.0 | 30.0 | 26.9 | 26.9 |
| DEX0477_016.nt.5 | 33428.0 | 27.8 | 27.8 | 11.1 | 11.1 | 33.3 | 33.3 | 30.0 | 30.0 | 26.9 | 26.9 |
| DEX0477_016.nt.5 | 37143.0 | 27.8 | 27.8 | 11.1 | 11.1 | 33.3 | 33.3 | 30.0 | 30.0 | 26.9 | 26.9 |
| DEX0477_016.nt.5 | 37143.2 | 27.8 | 27.8 | 11.1 | 11.1 | 33.3 | 33.3 | 30.0 | 30.0 | 26.9 | 26.9 |
| DEX0477_017.nt.1 | 15232.0 | 25.0 | 29.0 | 11.1 | 16.7 | 29.6 | 32.0 | 30.0 | 37.5 | 23.1 | 26.1 |
| DEX0477_017.nt.1 | 15233.0 | 25.0 | 25.7 | 11.1 | 11.1 | 29.6 | 30.8 | 30.0 | 30.0 | 23.1 | 24.0 |
| DEX0477_018.nt.1 | 22280.0 | 13.9 | 13.9 | 33.3 | 33.3 | 7.4 | 7.4 | 20.0 | 20.0 | 11.5 | 11.5 |
| DEX0477_019.nt.1 | 41937.0 | 22.2 | 36.4 | 22.2 | 50.0 | 22.2 | 33.3 | 10.0 | 12.5 | 26.9 | 50.0 |
| DEX0477_019.nt.1 | 41937.2 | 22.2 | 36.4 | 22.2 | 40.0 | 22.2 | 35.3 | 10.0 | 11.1 | 26.9 | 53.8 |
| DEX0477_019.nt.1 | 41938.0 | 27.8 | 43.5 | 22.2 | 50.0 | 29.6 | 42.1 | 30.0 | 42.9 | 26.9 | 43.8 |
| DEX0477_019.nt.1 | 41938.2 | 22.2 | 33.3 | 22.2 | 40.0 | 22.2 | 31.6 | 20.0 | 22.2 | 23.1 | 40.0 |
| DEX0477_020.nt.2 | 41937.0 | 22.2 | 36.4 | 22.2 | 50.0 | 22.2 | 33.3 | 10.0 | 12.5 | 26.9 | 50.0 |
| DEX0477_020.nt.1 | 41937.2 | 22.2 | 36.4 | 22.2 | 40.0 | 22.2 | 35.3 | 10.0 | 11.1 | 26.9 | 53.8 |
| DEX0477_020.nt.1 | 41938.0 | 27.8 | 43.5 | 22.2 | 50.0 | 29.6 | 42.1 | 30.0 | 42.9 | 26.9 | 43.8 |
| DEX0477_020.nt.1 | 41938.2 | 22.2 | 33.3 | 22.2 | 40.0 | 22.2 | 31.6 | 20.0 | 22.2 | 23.1 | 40.0 |
| DEX0477_020.nt.2 | 41937.0 | 22.2 | 36.4 | 22.2 | 50.0 | 22.2 | 33.3 | 10.0 | 12.5 | 26.9 | 50.0 |
| DEX0477_020.nt.2 | 41937.2 | 22.2 | 36.4 | 22.2 | 40.0 | 22.2 | 35.3 | 10.0 | 11.1 | 26.9 | 53.8 |
| DEX0477_020.nt.2 | 41938.0 | 27.8 | 43.5 | 22.2 | 50.0 | 29.6 | 42.1 | 30.0 | 42.9 | 26.9 | 43.8 |
| DEX0477_020.nt.2 | 41938.2 | 22.2 | 33.3 | 22.2 | 40.0 | 22.2 | 31.6 | 20.0 | 22.2 | 23.1 | 40.0 |
| DEX0477_021.nt.1 | 26770.0 | 52.8 | 55.9 | 55.6 | 71.4 | 51.9 | 51.9 | 90.0 | 90.0 | 38.5 | 41.7 |
| DEX0477_021.nt.1 | 26771.0 | 52.8 | 55.9 | 55.6 | 55.6 | 51.9 | 56.0 | 90.0 | 90.0 | 38.5 | 41.7 |
| DEX0477_021.nt.1 | 27321.0 | 52.8 | 52.8 | 55.6 | 55.6 | 51.9 | 51.9 | 90.0 | 90.0 | 38.5 | 38.5 |
| DEX0477_021.nt.1 | 27322.0 | 52.8 | 52.8 | 55.6 | 55.6 | 51.9 | 51.9 | 90.0 | 90.0 | 38.5 | 38.5 |
| DEX0477_021.nt.1 | 33088.0 | 47.2 | 54.8 | 55.6 | 55.6 | 44.4 | 54.5 | 80.0 | 88.9 | 34.6 | 40.9 |
| DEX0477_021.nt.1 | 33088.2 | 50.0 | 51.4 | 55.6 | 55.6 | 48.1 | 50.0 | 90.0 | 90.0 | 34.6 | 36.0 |
| DEX0477_021.nt.1 | 33089.0 | 52.8 | 55.9 | 55.6 | 62.5 | 51.9 | 53.8 | 90.0 | 90.0 | 38.5 | 41.7 |
| DEX0477_021.nt.1 | 33089.2 | 52.8 | 55.9 | 55.6 | 62.5 | 51.9 | 53.8 | 90.0 | 90.0 | 38.5 | 41.7 |
| DEX0477_021.nt.2 | 26770.0 | 52.8 | 55.9 | 55.6 | 71.4 | 51.9 | 51.9 | 90.0 | 90.0 | 38.5 | 41.7 |
| DEX0477_021.nt.2 | 26771.0 | 52.8 | 55.9 | 55.6 | 55.6 | 51.9 | 56.0 | 90.0 | 90.0 | 38.5 | 41.7 |
| DEX0477_021.nt.2 | 27321.0 | 52.8 | 52.8 | 55.6 | 55.6 | 51.9 | 51.9 | 90.0 | 90.0 | 38.5 | 38.5 |
| DEX0477_021.nt.2 | 27322.0 | 52.8 | 52.8 | 55.6 | 55.6 | 51.9 | 51.9 | 90.0 | 90.0 | 38.5 | 38.5 |
| DEX0477_021.nt.2 | 33088.0 | 47.2 | 54.8 | 55.6 | 55.6 | 44.4 | 54.5 | 80.0 | 88.9 | 34.6 | 40.9 |
| DEX0477_021.nt.2 | 33088.2 | 50.0 | 51.4 | 55.6 | 55.6 | 48.1 | 50.0 | 90.0 | 90.0 | 34.6 | 36.0 |
| DEX0477_021.nt.2 | 33089.0 | 52.8 | 55.9 | 55.6 | 62.5 | 51.9 | 53.8 | 90.0 | 90.0 | 38.5 | 41.7 |
| DEX0477_021.nt.2 | 33089.2 | 52.8 | 55.9 | 55.6 | 62.5 | 51.9 | 53.8 | 90.0 | 90.0 | 38.5 | 41.7 |
| DEX0477_022.nt.1 | 41937.0 | 22.2 | 36.4 | 22.2 | 50.0 | 22.2 | 33.3 | 10.0 | 12.5 | 26.9 | 50.0 |
| DEX0477_022.nt.1 | 41937.2 | 22.2 | 36.4 | 22.2 | 40.0 | 22.2 | 35.3 | 10.0 | 11.1 | 26.9 | 53.8 |
| DEX0477_023.nt.1 | 27321.0 | 52.8 | 52.8 | 55.6 | 55.6 | 51.9 | 51.9 | 90.0 | 90.0 | 38.5 | 38.5 |
| DEX0477_023.nt.1 | 33088.0 | 47.2 | 54.8 | 55.6 | 55.6 | 44.4 | 54.5 | 80.0 | 88.9 | 34.6 | 40.9 |
| DEX0477_023.nt.1 | 33088.2 | 50.0 | 51.4 | 55.6 | 55.6 | 48.1 | 50.0 | 90.0 | 90.0 | 34.6 | 36.0 |
| DEX0477_024.nt.1 | 26770.0 | 52.8 | 55.9 | 55.6 | 71.4 | 51.9 | 51.9 | 90.0 | 90.0 | 38.5 | 41.7 |
| DEX0477_024.nt.1 | 26771.0 | 52.8 | 55.9 | 55.6 | 55.6 | 51.9 | 56.0 | 90.0 | 90.0 | 38.5 | 41.7 |
| DEX0477_024.nt.2 | 26770.0 | 52.8 | 55.9 | 55.6 | 71.4 | 51.9 | 51.9 | 90.0 | 90.0 | 38.5 | 41.7 |
| DEX0477_024.nt.2 | 26771.0 | 52.8 | 55.9 | 55.6 | 55.6 | 51.9 | 56.0 | 90.0 | 90.0 | 38.5 | 41.7 |
| DEX0477_024.nt.3 | 26770.0 | 52.8 | 55.9 | 55.6 | 71.4 | 51.9 | 51.9 | 90.0 | 90.0 | 38.5 | 41.7 |
| DEX0477_024.nt.3 | 26771.0 | 52.8 | 55.9 | 55.6 | 55.6 | 51.9 | 56.0 | 90.0 | 90.0 | 38.5 | 41.7 |
| DEX0477_024.nt.4 | 26770.0 | 52.8 | 55.9 | 55.6 | 71.4 | 51.9 | 51.9 | 90.0 | 90.0 | 38.5 | 41.7 |
| DEX0477_025.nt.1 | 19468.0 | 55.6 | 55.6 | 55.6 | 55.6 | 55.6 | 55.6 | 80.0 | 80.0 | 46.2 | 46.2 |
| DEX0477_025.nt.1 | 19469.0 | 52.8 | 52.8 | 55.6 | 55.6 | 51.9 | 51.9 | 80.0 | 80.0 | 42.3 | 42.3 |
| DEX0477_026.nt.1 | 16950.0 | 11.1 | 11.8 | 11.1 | 11.1 | 11.1 | 12.0 | 30.0 | 30.0 | 3.8 | 4.2 |
| DEX0477_027.nt.5 | 13661.0 | 25.0 | 25.0 | 44.4 | 44.4 | 18.5 | 18.5 | 50.0 | 50.0 | 15.4 | 15.4 |
| DEX0477_027.nt.6 | 13661.0 | 25.0 | 25.0 | 44.4 | 44.4 | 18.5 | 18.5 | 50.0 | 50.0 | 15.4 | 15.4 |
| DEX0477_027.nt.7 | 13661.0 | 25.0 | 25.0 | 44.4 | 44.4 | 18.5 | 18.5 | 50.0 | 50.0 | 15.4 | 15.4 |
| DEX0477_060.nt.1 | 23646.0 | 55.6 | 57.1 | 33.3 | 33.3 | 63.0 | 65.4 | 80.0 | 80.0 | 46.2 | 48.0 |
| DEX0477_060.nt.1 | 23647.0 | 52.8 | 52.8 | 33.3 | 33.3 | 59.3 | 59.3 | 70.0 | 70.0 | 46.2 | 46.2 |
| DEX0477_060.nt.1 | 31004.0 | 0.0 | 0.0 | 0.0 | 0.0 | 0.0 | 0.0 | 0.0 | 0.0 | 0.0 | 0.0 |
| DEX0477_060.nt.1 | 31005.0 | 0.0 | 0.0 | 0.0 | 0.0 | 0.0 | 0.0 | 0.0 | 0.0 | 0.0 | 0.0 |
| DEX0477_060.nt.2 | 23646.0 | 55.6 | 57.1 | 33.3 | 33.3 | 63.0 | 65.4 | 80.0 | 80.0 | 46.2 | 48.0 |
| DEX0477_060.nt.2 | 23647.0 | 52.8 | 52.8 | 33.3 | 33.3 | 59.3 | 59.3 | 70.0 | 70.0 | 46.2 | 46.2 |
| DEX0477_060.nt.2 | 31004.0 | 0.0 | 0.0 | 0.0 | 0.0 | 0.0 | 0.0 | 0.0 | 0.0 | 0.0 | 0.0 |
| DEX0477_060.nt.2 | 31005.0 | 0.0 | 0.0 | 0.0 | 0.0 | 0.0 | 0.0 | 0.0 | 0.0 | 0.0 | 0.0 |
| DEX0477_061.nt.1 | 22688.0 | 22.2 | 22.2 | 11.1 | 11.1 | 25.9 | 25.9 | 10.0 | 10.0 | 26.9 | 26.9 |
| DEX0477_061.nt.1 | 22689.0 | 27.8 | 29.4 | 11.1 | 11.1 | 33.3 | 36.0 | 10.0 | 10.0 | 34.6 | 37.5 |
| DEX0477_061.nt.2 | 22688.0 | 22.2 | 22.2 | 11.1 | 11.1 | 25.9 | 25.9 | 10.0 | 10.0 | 26.9 | 26.9 |
| DEX0477_061.nt.2 | 22689.0 | 27.8 | 29.4 | 11.1 | 11.1 | 33.3 | 36.0 | 10.0 | 10.0 | 34.6 | 37.5 |
| DEX0477_062.nt.1 | 22303.0 | 11.1 | 11.1 | 22.2 | 22.2 | 7.4 | 7.4 | 10.0 | 10.0 | 11.5 | 11.5 |
| DEX0477_062.nt.1 | 22304.0 | 11.1 | 11.1 | 22.2 | 22.2 | 7.4 | 7.4 | 20.0 | 20.0 | 7.7 | 7.7 |
| DEX0477_063.nt.1 | 12615.0 | 13.9 | 13.9 | 33.3 | 33.3 | 7.4 | 7.4 | 20.0 | 20.0 | 11.5 | 11.5 |
| DEX0477_063.nt.1 | 12616.0 | 8.3 | 8.6 | 22.2 | 22.2 | 3.7 | 3.8 | 10.0 | 10.0 | 7.7 | 8.0 |
| DEX0477_063.nt.1 | 33626.0 | 8.3 | 8.3 | 22.2 | 22.2 | 3.7 | 3.7 | 0.0 | 0.0 | 11.5 | 11.5 |
| DEX0477_063.nt.2 | 12615.0 | 13.9 | 13.9 | 33.3 | 33.3 | 7.4 | 7.4 | 20.0 | 20.0 | 11.5 | 11.5 |
| DEX0477_063.nt.2 | 12616.0 | 8.3 | 8.6 | 22.2 | 22.2 | 3.7 | 3.8 | 10.0 | 10.0 | 7.7 | 8.0 |
| DEX0477_064.nt.1 | 14047.0 | 22.2 | 22.2 | 11.1 | 11.1 | 25.9 | 25.9 | 20.0 | 20.0 | 23.1 | 23.1 |
| DEX0477_064.nt.1 | 31772.0 | 25.0 | 25.0 | 11.1 | 11.1 | 29.6 | 29.6 | 30.0 | 30.0 | 23.1 | 23.1 |
| DEX0477_067.nt.1 | 14791.0 | 58.3 | 58.3 | 55.6 | 55.6 | 59.3 | 59.3 | 40.0 | 40.0 | 65.4 | 65.4 |
| DEX0477_069.nt.1 | 27947.0 | 8.3 | 42.9 | 22.2 | 100.0 | 3.7 | 20.0 | 20.0 | 50.0 | 3.8 | 33.3 |
| DEX0477_069.nt.1 | 27948.0 | 8.3 | 16.7 | 22.2 | 50.0 | 3.7 | 7.1 | 20.0 | 28.6 | 3.8 | 9.1 |
| DEX0477_070.nt.1 | 16104.0 | 50.0 | 51.4 | 22.2 | 22.2 | 59.3 | 61.5 | 40.0 | 40.0 | 53.8 | 56.0 |
| DEX0477_071.nt.1 | 16462.0 | 41.7 | 41.7 | 44.4 | 44.4 | 40.7 | 40.7 | 30.0 | 30.0 | 46.2 | 46.2 |
| DEX0477_071.nt.1 | 16463.0 | 33.3 | 33.3 | 22.2 | 22.2 | 37.0 | 37.0 | 20.0 | 20.0 | 38.5 | 38.5 |
| DEX0477_071.nt.2 | 16462.0 | 41.7 | 41.7 | 44.4 | 44.4 | 40.7 | 40.7 | 30.0 | 30.0 | 46.2 | 46.2 |
| DEX0477_071.nt.2 | 16463.0 | 33.3 | 33.3 | 22.2 | 22.2 | 37.0 | 37.0 | 20.0 | 20.0 | 38.5 | 38.5 |
| DEX0477_072.nt.1 | 18688.0 | 52.8 | 55.9 | 44.4 | 44.4 | 55.6 | 60.0 | 20.0 | 20.0 | 65.4 | 70.8 |
| DEX0477_072.nt.2 | 18688.0 | 52.8 | 55.9 | 44.4 | 44.4 | 55.6 | 60.0 | 20.0 | 20.0 | 65.4 | 70.8 |

[0572] TABLE 2

| | | Mam | | | | | |
|---|---|---|---|---|---|---|---|
| | | 550 | Mam 550 | | Mam 550 | | Mam 550 |
| | | ALL | ALL | Mam 550 | ST1 | Mam 550 | ST2, 3 |
| | Oligo | % up | % valid | ST1 % up | % valid | ST2, 3 | % valid up |
| DEX ID | Name | n = 36 | up n = 36 | n = 9 | up n = 9 | % up n = 27 | n = 27 |
| DEX0477_005.nt.1 | 15806.0 | 36.1 | 36.1 | 44.4 | 44.4 | 33.3 | 33.3 |
| DEX0477_007.nt.1 | 18644.0 | 13.9 | 33.3 | 22.2 | 50.0 | 11.1 | 27.3 |
| DEX0477_007.nt.1 | 18644.2 | 13.9 | 33.3 | 22.2 | 50.0 | 11.1 | 27.3 |
| DEX0477_007.nt.1 | 18645.0 | 13.9 | 38.5 | 22.2 | 66.7 | 11.1 | 30.0 |
| DEX0477_007.nt.1 | 18645.2 | 13.9 | 35.7 | 22.2 | 66.7 | 11.1 | 27.3 |
| DEX0477_010.nt.1 | 15806.0 | 36.1 | 36.1 | 44.4 | 44.4 | 33.3 | 33.3 |
| DEX0477_012.nt.1 | 16992.0 | 55.6 | 55.6 | 55.6 | 55.6 | 55.6 | 55.6 |
| DEX0477_012.nt.1 | 20235.0 | 55.6 | 55.6 | 55.6 | 55.6 | 55.6 | 55.6 |
| DEX0477_014.nt.1 | 27949.0 | 13.9 | 45.5 | 11.1 | 33.3 | 14.8 | 50.0 |
| DEX0477_014.nt.2 | 27949.0 | 13.9 | 45.5 | 11.1 | 33.3 | 14.8 | 50.0 |
| DEX0477_014.nt.3 | 27949.0 | 13.9 | 45.5 | 11.1 | 33.3 | 14.8 | 50.0 |
| DEX0477_015.nt.1 | 20399.0 | 22.2 | 22.9 | 33.3 | 37.5 | 18.5 | 18.5 |
| DEX0477_015.nt.2 | 20391.0 | 5.6 | 28.6 | 11.1 | 33.3 | 3.7 | 25.0 |
| DEX0477_015.nt.2 | 20399.0 | 22.2 | 22.9 | 33.3 | 37.5 | 18.5 | 18.5 |
| DEX0477_016.nt.1 | 15232.0 | 22.2 | 40.0 | 11.1 | 33.3 | 25.9 | 41.2 |
| DEX0477_016.nt.1 | 15233.0 | 25.0 | 36.0 | 11.1 | 16.7 | 29.6 | 42.1 |
| DEX0477_016.nt.1 | 33428.0 | 30.6 | 30.6 | 11.1 | 11.1 | 37.0 | 37.0 |
| DEX0477_016.nt.1 | 37143.0 | 30.6 | 30.6 | 11.1 | 11.1 | 37.0 | 37.0 |
| DEX0477_016.nt.1 | 37143.2 | 27.8 | 27.8 | 11.1 | 11.1 | 33.3 | 33.3 |
| DEX0477_016.nt.2 | 15232.0 | 22.2 | 40.0 | 11.1 | 33.3 | 25.9 | 41.2 |
| DEX0477_016.nt.2 | 15233.0 | 25.0 | 36.0 | 11.1 | 16.7 | 29.6 | 42.1 |
| DEX0477_016.nt.2 | 33428.0 | 30.6 | 30.6 | 11.1 | 11.1 | 37.0 | 37.0 |
| DEX0477_016.nt.2 | 37143.0 | 30.6 | 30.6 | 11.1 | 11.1 | 37.0 | 37.0 |
| DEX0477_016.nt.2 | 37143.2 | 27.8 | 27.8 | 11.1 | 11.1 | 33.3 | 33.3 |
| DEX0477_016.nt.4 | 33428.0 | 30.6 | 30.6 | 11.1 | 11.1 | 37.0 | 37.0 |
| DEX0477_016.nt.4 | 37143.0 | 30.6 | 30.6 | 11.1 | 11.1 | 37.0 | 37.0 |
| DEX0477_016.nt.4 | 37143.2 | 27.8 | 27.8 | 11.1 | 11.1 | 33.3 | 33.3 |
| DEX0477_016.nt.5 | 33428.0 | 30.6 | 30.6 | 11.1 | 11.1 | 37.0 | 37.0 |
| DEX0477_016.nt.5 | 37143.0 | 30.6 | 30.6 | 11.1 | 11.1 | 37.0 | 37.0 |
| DEX0477_016.nt.5 | 37143.2 | 27.8 | 27.8 | 11.1 | 11.1 | 33.3 | 33.3 |
| DEX0477_017.nt.1 | 15232.0 | 22.2 | 40.0 | 11.1 | 33.3 | 25.9 | 41.2 |
| DEX0477_017.nt.1 | 15233.0 | 25.0 | 36.0 | 11.1 | 16.7 | 29.6 | 42.1 |
| DEX0477_018.nt.1 | 22280.0 | 16.7 | 16.7 | 33.3 | 33.3 | 11.1 | 11.1 |
| DEX0477_019.nt.1 | 41937.0 | 19.4 | 58.3 | 22.2 | 100.0 | 18.5 | 50.0 |
| DEX0477_019.nt.1 | 41937.2 | 22.2 | 66.7 | 22.2 | 100.0 | 22.2 | 60.0 |
| DEX0477_019.nt.1 | 41938.0 | 25.0 | 56.2 | 22.2 | 50.0 | 25.9 | 58.3 |
| DEX0477_019.nt.1 | 41938.2 | 25.0 | 60.0 | 22.2 | 50.0 | 25.9 | 63.6 |
| DEX0477_020.nt.1 | 41937.0 | 19.4 | 58.3 | 22.2 | 100.0 | 18.5 | 50.0 |
| DEX0477_020.nt.1 | 41937.2 | 22.2 | 66.7 | 22.2 | 100.0 | 22.2 | 60.0 |
| DEX0477_020.nt.1 | 41938.0 | 25.0 | 56.2 | 22.2 | 50.0 | 25.9 | 58.3 |
| DEX0477_020.nt.1 | 41938.2 | 25.0 | 60.0 | 22.2 | 50.0 | 25.9 | 63.6 |
| DEX0477_020.nt.2 | 41937.0 | 19.4 | 58.3 | 22.2 | 100.0 | 18.5 | 50.0 |
| DEX0477_020.nt.2 | 41937.2 | 22.2 | 66.7 | 22.2 | 100.0 | 22.2 | 60.0 |
| DEX0477_020.nt.2 | 41938.0 | 25.0 | 56.2 | 22.2 | 50.0 | 25.9 | 58.3 |
| DEX0477_020.nt.2 | 41938.2 | 25.0 | 60.0 | 22.2 | 50.0 | 25.9 | 63.6 |
| DEX0477_021.nt.1 | 26770.0 | 52.8 | 63.3 | 55.6 | 83.3 | 51.9 | 58.3 |
| DEX0477_021.nt.1 | 26771.0 | 52.8 | 63.3 | 55.6 | 71.4 | 51.9 | 60.9 |
| DEX0477_021.nt.1 | 27321.0 | 52.8 | 57.6 | 55.6 | 62.5 | 51.9 | 56.0 |
| DEX0477_021.nt.1 | 27322.0 | 52.8 | 57.6 | 55.6 | 71.4 | 51.9 | 53.8 |
| DEX0477_021.nt.1 | 33088.0 | 50.0 | 58.1 | 55.6 | 62.5 | 48.1 | 56.5 |
| DEX0477_021.nt.1 | 33088.2 | 50.0 | 56.2 | 55.6 | 62.5 | 48.1 | 54.2 |
| DEX0477_021.nt.1 | 33089.0 | 52.8 | 55.9 | 55.6 | 62.5 | 51.9 | 53.8 |
| DEX0477_021.nt.1 | 33089.2 | 52.8 | 59.4 | 55.6 | 71.4 | 51.9 | 56.0 |
| DEX0477_021.nt.2 | 26770.0 | 52.8 | 63.3 | 55.6 | 83.3 | 51.9 | 58.3 |
| DEX0477_021.nt.2 | 26771.0 | 52.8 | 63.3 | 55.6 | 71.4 | 51.9 | 60.9 |
| DEX0477_021.nt.2 | 27321.0 | 52.8 | 57.6 | 55.6 | 62.5 | 51.9 | 56.0 |
| DEX0477_021.nt.2 | 27322.0 | 52.8 | 57.6 | 55.6 | 71.4 | 51.9 | 53.8 |
| DEX0477_021.nt.2 | 33088.0 | 50.0 | 58.1 | 55.6 | 62.5 | 48.1 | 56.5 |
| DEX0477_021.nt.2 | 33088.2 | 50.0 | 56.2 | 55.6 | 62.5 | 48.1 | 54.2 |
| DEX0477_021.nt.2 | 33089.0 | 52.8 | 55.9 | 55.6 | 62.5 | 51.9 | 53.8 |
| DEX0477_021.nt.2 | 33089.2 | 52.8 | 59.4 | 55.6 | 71.4 | 51.9 | 56.0 |
| DEX0477_022.nt.1 | 41937.0 | 19.4 | 58.3 | 22.2 | 100.0 | 18.5 | 50.0 |
| DEX0477_022.nt.1 | 41937.2 | 22.2 | 66.7 | 22.2 | 100.0 | 22.2 | 60.0 |
| DEX0477_023.nt.1 | 27321.0 | 52.8 | 57.6 | 55.6 | 62.5 | 51.9 | 56.0 |
| DEX0477_023.nt.1 | 33088.0 | 50.0 | 58.1 | 55.6 | 62.5 | 48.1 | 56.5 |
| DEX0477_023.nt.1 | 33088.2 | 50.0 | 56.2 | 55.6 | 62.5 | 48.1 | 54.2 |
| DEX0477_024.nt.1 | 26770.0 | 52.8 | 63.3 | 55.6 | 83.3 | 51.9 | 58.3 |
| DEX0477_024.nt.1 | 26771.0 | 52.8 | 63.3 | 55.6 | 71.4 | 51.9 | 60.9 |
| DEX0477_024.nt.2 | 26770.0 | 52.8 | 63.3 | 55.6 | 83.3 | 51.9 | 58.3 |
| DEX0477_024.nt.2 | 26771.0 | 52.8 | 63.3 | 55.6 | 71.4 | 51.9 | 60.9 |
| DEX0477_024.nt.3 | 26770.0 | 52.8 | 63.3 | 55.6 | 83.3 | 51.9 | 58.3 |
| DEX0477_024.nt.3 | 26771.0 | 52.8 | 63.3 | 55.6 | 71.4 | 51.9 | 60.9 |
| DEX0477_024.nt.4 | 26770.0 | 52.8 | 63.3 | 55.6 | 83.3 | 51.9 | 58.3 |
| DEX0477_025.nt.1 | 19468.0 | 61.1 | 61.1 | 55.6 | 55.6 | 63.0 | 63.0 |
| DEX0477_025.nt.1 | 19469.0 | 58.3 | 58.3 | 55.6 | 55.6 | 59.3 | 59.3 |
| DEX0477_026.nt.1 | 16950.0 | 11.1 | 14.3 | 11.1 | 14.3 | 11.1 | 14.3 |
| DEX0477_027.nt.5 | 13661.0 | 33.3 | 33.3 | 44.4 | 44.4 | 29.6 | 29.6 |
| DEX0477_027.nt.6 | 13661.0 | 33.3 | 33.3 | 44.4 | 44.4 | 29.6 | 29.6 |
| DEX0477_027.nt.7 | 13661.0 | 33.3 | 33.3 | 44.4 | 44.4 | 29.6 | 29.6 |
| DEX0477_028.nt.1 | 23665.0 | 27.8 | 27.8 | 44.4 | 44.4 | 22.2 | 22.2 |
| DEX0477_028.nt.2 | 23665.0 | 27.8 | 27.8 | 44.4 | 44.4 | 22.2 | 22.2 |
| DEX0477_028.nt.3 | 23665.0 | 27.8 | 27.8 | 44.4 | 44.4 | 22.2 | 22.2 |
| DEX0477_028.nt.4 | 23665.0 | 27.8 | 27.8 | 44.4 | 44.4 | 22.2 | 22.2 |
| DEX0477_029.nt.1 | 23665.0 | 27.8 | 27.8 | 44.4 | 44.4 | 22.2 | 22.2 |
| DEX0477_058.nt.1 | 19316.0 | 25.0 | 30.0 | 22.2 | 33.3 | 25.9 | 29.2 |
| DEX0477_058.nt.1 | 19330.0 | 22.2 | 25.8 | 33.3 | 42.9 | 18.5 | 20.8 |
| DEX0477_060.nt.1 | 23646.0 | 58.3 | 60.0 | 44.4 | 44.4 | 63.0 | 65.4 |
| DEX0477_060.nt.1 | 23647.0 | 58.3 | 58.3 | 33.3 | 33.3 | 66.7 | 66.7 |
| DEX0477_060.nt.2 | 23646.0 | 58.3 | 60.0 | 44.4 | 44.4 | 63.0 | 65.4 |
| DEX0477_060.nt.2 | 23647.0 | 58.3 | 58.3 | 33.3 | 33.3 | 66.7 | 66.7 |
| DEX0477_061.nt.1 | 22688.0 | 22.2 | 22.9 | 0.0 | 0.0 | 29.6 | 30.8 |
| DEX0477_061.nt.1 | 22689.0 | 33.3 | 37.5 | 22.2 | 22.2 | 37.0 | 43.5 |
| DEX0477_061.nt.2 | 22688.0 | 22.2 | 22.9 | 0.0 | 0.0 | 29.6 | 30.8 |
| DEX0477_061.nt.2 | 22689.0 | 33.3 | 37.5 | 22.2 | 22.2 | 37.0 | 43.5 |
| DEX0477_063.nt.1 | 12615.0 | 16.7 | 16.7 | 33.3 | 33.3 | 11.1 | 11.1 |
| DEX0477_063.nt.1 | 12616.0 | 13.9 | 14.3 | 33.3 | 33.3 | 7.4 | 7.7 |
| DEX0477_063.nt.1 | 33626.0 | 13.9 | 13.9 | 33.3 | 33.3 | 7.4 | 7.4 |
| DEX0477_063.nt.2 | 12615.0 | 16.7 | 16.7 | 33.3 | 33.3 | 11.1 | 11.1 |
| DEX0477_063.nt.2 | 12616.0 | 13.9 | 14.3 | 33.3 | 33.3 | 7.4 | 7.7 |
| DEX0477_067.nt.1 | 14791.0 | 58.3 | 58.3 | 55.6 | 55.6 | 59.3 | 59.3 |
| DEX0477_069.nt.1 | 27947.0 | 11.1 | 100.0 | 33.3 | 100.0 | 3.7 | 100.0 |
| DEX0477_069.nt.1 | 27948.0 | 8.3 | 27.3 | 22.2 | 66.7 | 3.7 | 12.5 |
| DEX0477_070.nt.1 | 16104.0 | 58.3 | 60.0 | 22.2 | 22.2 | 70.4 | 73.1 |
| DEX0477_071.nt.1 | 16462.0 | 50.0 | 50.0 | 44.4 | 44.4 | 51.9 | 51.9 |
| DEX0477_071.nt.1 | 16463.0 | 38.9 | 38.9 | 44.4 | 44.4 | 37.0 | 37.0 |
| DEX0477_071.nt.2 | 16462.0 | 50.0 | 50.0 | 44.4 | 44.4 | 51.9 | 51.9 |
| DEX0477_071.nt.2 | 16463.0 | 38.9 | 38.9 | 44.4 | 44.4 | 37.0 | 37.0 |
| DEX0477_072.nt.1 | 18688.0 | 63.9 | 69.7 | 66.7 | 66.7 | 63.0 | 70.8 |
| DEX0477_072.nt.2 | 18688.0 | 63.9 | 69.7 | 66.7 | 66.7 | 63.0 | 70.8 |

[0573] TABLE 3

| | | | | | Mam | | | | |
|---|---|---|---|---|---|---|---|---|---|
| | | | Mam | Mam | NOT | | | | |
| | | Mam | HER2 | NOT | HER2 | | Mam | Mam | |
| | | HER2 | up % | HER2 | up % | Mam | ER up % | NOT | Mam NOT |
| | | up | valid | up | valid | ER up | valid | ER up | ER up |
| | Oligo | % up | up | % up | up | % up | up | % up | % valid |
| DEX ID | Name | n = 10 | n = 10 | n = 26 | n = 26 | n = 20 | n = 20 | n = 16 | up n = 16 |
| DEX0477_005.nt.1 | 15805.0 | 0.0 | 0.0 | 19.2 | 19.2 | 0.0 | 0.0 | 31.2 | 31.2 |
| DEX0477_005.nt.1 | 15806.0 | 0.0 | 0.0 | 34.6 | 34.6 | 0.0 | 0.0 | 56.2 | 56.2 |
| DEX0477_007.nt.1 | 15783.0 | 10.0 | 10.0 | 15.4 | 15.4 | 0.0 | 0.0 | 31.2 | 31.2 |
| DEX0477_007.nt.1 | 18644.0 | 10.0 | 14.3 | 15.4 | 23.5 | 0.0 | 0.0 | 31.2 | 41.7 |
| DEX0477_007.nt.1 | 18644.2 | 10.0 | 12.5 | 15.4 | 23.5 | 0.0 | 0.0 | 31.2 | 38.5 |
| DEX0477_007.nt.1 | 18645.0 | 10.0 | 14.3 | 15.4 | 26.7 | 0.0 | 0.0 | 31.2 | 45.5 |
| DEX0477_007.nt.1 | 18645.2 | 10.0 | 14.3 | 15.4 | 23.5 | 0.0 | 0.0 | 31.2 | 41.7 |
| DEX0477_010.nt.1 | 15805.0 | 0.0 | 0.0 | 19.2 | 19.2 | 0.0 | 0.0 | 31.2 | 31.2 |
| DEX0477_010.nt.1 | 15806.0 | 0.0 | 0.0 | 34.6 | 34.6 | 0.0 | 0.0 | 56.2 | 56.2 |
| DEX0477_012.nt.1 | 16992.0 | 50.0 | 50.0 | 50.0 | 50.0 | 35.0 | 35.0 | 68.8 | 68.8 |
| DEX0477_012.nt.1 | 20235.0 | 50.0 | 50.0 | 50.0 | 50.0 | 40.0 | 40.0 | 62.5 | 62.5 |
| DEX0477_014.nt.1 | 27949.0 | 30.0 | 50.0 | 7.7 | 22.2 | 0.0 | 0.0 | 31.2 | 83.3 |
| DEX0477_014.nt.2 | 27949.0 | 30.0 | 50.0 | 7.7 | 22.2 | 0.0 | 0.0 | 31.2 | 83.3 |
| DEX0477_014.nt.3 | 27949.0 | 30.0 | 50.0 | 7.7 | 22.2 | 0.0 | 0.0 | 31.2 | 83.3 |
| DEX0477_015.nt.1 | 17244.0 | 30.0 | 33.3 | 11.5 | 11.5 | 30.0 | 31.6 | 0.0 | 0.0 |
| DEX0477_015.nt.1 | 17292.0 | 40.0 | 40.0 | 11.5 | 11.5 | 35.0 | 35.0 | 0.0 | 0.0 |
| DEX0477_015.nt.1 | 20399.0 | 40.0 | 40.0 | 11.5 | 12.0 | 35.0 | 35.0 | 0.0 | 0.0 |
| DEX0477_015.nt.2 | 17244.0 | 30.0 | 33.3 | 11.5 | 11.5 | 30.0 | 31.6 | 0.0 | 0.0 |
| DEX0477_015.nt.2 | 17292.0 | 40.0 | 40.0 | 11.5 | 11.5 | 35.0 | 35.0 | 0.0 | 0.0 |
| DEX0477_015.nt.2 | 20399.0 | 40.0 | 40.0 | 11.5 | 12.0 | 35.0 | 35.0 | 0.0 | 0.0 |
| DEX0477_016.nt.1 | 15232.0 | 90.0 | 90.0 | 0.0 | 0.0 | 25.0 | 27.8 | 25.0 | 30.8 |
| DEX0477_016.nt.1 | 15233.0 | 90.0 | 90.0 | 0.0 | 0.0 | 25.0 | 25.0 | 25.0 | 26.7 |
| DEX0477_016.nt.1 | 33428.0 | 100.0 | 100.0 | 0.0 | 0.0 | 30.0 | 30.0 | 25.0 | 25.0 |
| DEX0477_016.nt.1 | 37143.0 | 100.0 | 100.0 | 0.0 | 0.0 | 30.0 | 30.0 | 25.0 | 25.0 |
| DEX0477_016.nt.1 | 37143.2 | 100.0 | 100.0 | 0.0 | 0.0 | 30.0 | 30.0 | 25.0 | 25.0 |
| DEX0477_016.nt.2 | 15232.0 | 90.0 | 90.0 | 0.0 | 0.0 | 25.0 | 27.8 | 25.0 | 30.8 |
| DEX0477_016.nt.2 | 15233.0 | 90.0 | 90.0 | 0.0 | 0.0 | 25.0 | 25.0 | 25.0 | 26.7 |
| DEX0477_016.nt.2 | 33428.0 | 100.0 | 100.0 | 0.0 | 0.0 | 30.0 | 30.0 | 25.0 | 25.0 |
| DEX0477_016.nt.2 | 37143.0 | 100.0 | 100.0 | 0.0 | 0.0 | 30.0 | 30.0 | 25.0 | 25.0 |
| DEX0477_016.nt.2 | 37143.2 | 100.0 | 100.0 | 0.0 | 0.0 | 30.0 | 30.0 | 25.0 | 25.0 |
| DEX0477_016.nt.4 | 33428.0 | 100.0 | 100.0 | 0.0 | 0.0 | 30.0 | 30.0 | 25.0 | 25.0 |
| DEX0477_016.nt.4 | 37143.0 | 100.0 | 100.0 | 0.0 | 0.0 | 30.0 | 30.0 | 25.0 | 25.0 |
| DEX0477_016.nt.4 | 37143.2 | 100.0 | 100.0 | 0.0 | 0.0 | 30.0 | 30.0 | 25.0 | 25.0 |
| DEX0477_016.nt.5 | 33428.0 | 100.0 | 100.0 | 0.0 | 0.0 | 30.0 | 30.0 | 25.0 | 25.0 |
| DEX0477_016.nt.5 | 37143.0 | 100.0 | 100.0 | 0.0 | 0.0 | 30.0 | 30.0 | 25.0 | 25.0 |
| DEX0477_016.nt.5 | 37143.2 | 100.0 | 100.0 | 0.0 | 0.0 | 30.0 | 30.0 | 25.0 | 25.0 |
| DEX0477_017.nt.1 | 15232.0 | 90.0 | 90.0 | 0.0 | 0.0 | 25.0 | 27.8 | 25.0 | 30.8 |
| DEX0477_017.nt.1 | 15233.0 | 90.0 | 90.0 | 0.0 | 0.0 | 25.0 | 25.0 | 25.0 | 26.7 |
| DEX0477_018.nt.1 | 22280.0 | 0.0 | 0.0 | 19.2 | 19.2 | 20.0 | 20.0 | 6.2 | 6.2 |
| DEX0477_019.nt.1 | 41937.0 | 40.0 | 50.0 | 15.4 | 28.6 | 25.0 | 31.2 | 18.8 | 50.0 |
| DEX0477_019.nt.1 | 41937.2 | 40.0 | 57.1 | 15.4 | 26.7 | 25.0 | 29.4 | 18.8 | 60.0 |
| DEX0477_019.nt.1 | 41938.0 | 50.0 | 50.0 | 19.2 | 38.5 | 35.0 | 46.7 | 18.8 | 37.5 |
| DEX0477_019.nt.1 | 41938.2 | 40.0 | 44.4 | 15.4 | 26.7 | 30.0 | 35.3 | 12.5 | 28.6 |
| DEX0477_020.nt.1 | 41937.0 | 40.0 | 50.0 | 15.4 | 28.6 | 25.0 | 31.2 | 18.8 | 50.0 |
| DEX0477_020.nt.1 | 41937.2 | 40.0 | 57.1 | 15.4 | 26.7 | 25.0 | 29.4 | 18.8 | 60.0 |
| DEX0477_020.nt.1 | 41938.0 | 50.0 | 50.0 | 19.2 | 38.5 | 35.0 | 46.7 | 18.8 | 37.5 |
| DEX0477_020.nt.1 | 41938.2 | 40.0 | 44.4 | 15.4 | 26.7 | 30.0 | 35.3 | 12.5 | 28.6 |
| DEX0477_020.nt.2 | 41937.0 | 40.0 | 50.0 | 15.4 | 28.6 | 25.0 | 31.2 | 18.8 | 50.0 |
| DEX0477_020.nt.2 | 41937.2 | 40.0 | 57.1 | 15.4 | 26.7 | 25.0 | 29.4 | 18.8 | 60.0 |
| DEX0477_020.nt.2 | 41938.0 | 50.0 | 50.0 | 19.2 | 38.5 | 35.0 | 46.7 | 18.8 | 37.5 |
| DEX0477_020.nt.2 | 41938.2 | 40.0 | 44.4 | 15.4 | 26.7 | 30.0 | 35.3 | 12.5 | 28.6 |
| DEX0477_021.nt.1 | 26770.0 | 70.0 | 70.0 | 46.2 | 50.0 | 85.0 | 85.0 | 12.5 | 14.3 |
| DEX0477_021.nt.1 | 26771.0 | 70.0 | 70.0 | 46.2 | 50.0 | 85.0 | 85.0 | 12.5 | 14.3 |
| DEX0477_021.nt.1 | 27321.0 | 70.0 | 70.0 | 46.2 | 46.2 | 85.0 | 85.0 | 12.5 | 12.5 |
| DEX0477_021.nt.1 | 27322.0 | 70.0 | 70.0 | 46.2 | 46.2 | 85.0 | 85.0 | 12.5 | 12.5 |
| DEX0477_021.nt.1 | 33088.0 | 60.0 | 66.7 | 42.3 | 50.0 | 75.0 | 83.3 | 12.5 | 15.4 |
| DEX0477_021.nt.1 | 33088.2 | 60.0 | 66.7 | 46.2 | 46.2 | 80.0 | 84.2 | 12.5 | 12.5 |
| DEX0477_021.nt.1 | 33089.0 | 70.0 | 70.0 | 46.2 | 50.0 | 85.0 | 85.0 | 12.5 | 14.3 |
| DEX0477_021.nt.1 | 33089.2 | 70.0 | 70.0 | 46.2 | 50.0 | 85.0 | 85.0 | 12.5 | 14.3 |
| DEX0477_021.nt.2 | 26770.0 | 70.0 | 70.0 | 46.2 | 50.0 | 85.0 | 85.0 | 12.5 | 14.3 |
| DEX0477_021.nt.2 | 26771.0 | 70.0 | 70.0 | 46.2 | 50.0 | 85.0 | 85.0 | 12.5 | 14.3 |
| DEX0477_021.nt.2 | 27321.0 | 70.0 | 70.0 | 46.2 | 46.2 | 85.0 | 85.0 | 12.5 | 12.5 |
| DEX0477_021.nt.2 | 27322.0 | 70.0 | 70.0 | 46.2 | 46.2 | 85.0 | 85.0 | 12.5 | 12.5 |
| DEX0477_021.nt.2 | 33088.0 | 60.0 | 66.7 | 42.3 | 50.0 | 75.0 | 83.3 | 12.5 | 15.4 |
| DEX0477_021.nt.2 | 33088.2 | 60.0 | 66.7 | 46.2 | 46.2 | 80.0 | 84.2 | 12.5 | 12.5 |
| DEX0477_021.nt.2 | 33089.0 | 70.0 | 70.0 | 46.2 | 50.0 | 85.0 | 85.0 | 12.5 | 14.3 |
| DEX0477_021.nt.2 | 33089.2 | 70.0 | 70.0 | 46.2 | 50.0 | 85.0 | 85.0 | 12.5 | 14.3 |
| DEX0477_022.nt.1 | 41937.0 | 40.0 | 50.0 | 15.4 | 28.6 | 25.0 | 31.2 | 18.8 | 50.0 |
| DEX0477_022.nt.1 | 41937.2 | 40.0 | 57.1 | 15.4 | 26.7 | 25.0 | 29.4 | 18.8 | 60.0 |
| DEX0477_023.nt.1 | 27321.0 | 70.0 | 70.0 | 46.2 | 46.2 | 85.0 | 85.0 | 12.5 | 12.5 |
| DEX0477_023.nt.1 | 33088.0 | 60.0 | 66.7 | 42.3 | 50.0 | 75.0 | 83.3 | 12.5 | 15.4 |
| DEX0477_023.nt.1 | 33088.2 | 60.0 | 66.7 | 46.2 | 46.2 | 80.0 | 84.2 | 12.5 | 12.5 |
| DEX0477_024.nt.1 | 26770.0 | 70.0 | 70.0 | 46.2 | 50.0 | 85.0 | 85.0 | 12.5 | 14.3 |
| DEX0477_024.nt.1 | 26771.0 | 70.0 | 70.0 | 46.2 | 50.0 | 85.0 | 85.0 | 12.5 | 14.3 |
| DEX0477_024.nt.2 | 26770.0 | 70.0 | 70.0 | 46.2 | 50.0 | 85.0 | 85.0 | 12.5 | 14.3 |
| DEX0477_024.nt.2 | 26771.0 | 70.0 | 70.0 | 46.2 | 50.0 | 85.0 | 85.0 | 12.5 | 14.3 |
| DEX0477_024.nt.3 | 26770.0 | 70.0 | 70.0 | 46.2 | 50.0 | 85.0 | 85.0 | 12.5 | 14.3 |
| DEX0477_024.nt.3 | 26771.0 | 70.0 | 70.0 | 46.2 | 50.0 | 85.0 | 85.0 | 12.5 | 14.3 |
| DEX0477_024.nt.4 | 26770.0 | 70.0 | 70.0 | 46.2 | 50.0 | 85.0 | 85.0 | 12.5 | 14.3 |
| DEX0477_025.nt.1 | 19468.0 | 20.0 | 20.0 | 69.2 | 69.2 | 60.0 | 60.0 | 50.0 | 50.0 |
| DEX0477_025.nt.1 | 19469.0 | 20.0 | 20.0 | 65.4 | 65.4 | 60.0 | 60.0 | 43.8 | 43.8 |
| DEX0477_026.nt.1 | 16950.0 | 20.0 | 25.0 | 7.7 | 7.7 | 20.0 | 20.0 | 0.0 | 0.0 |
| DEX0477_027.nt.5 | 13661.0 | 20.0 | 20.0 | 26.9 | 26.9 | 35.0 | 35.0 | 12.5 | 12.5 |
| DEX0477_027.nt.6 | 13661.0 | 20.0 | 20.0 | 26.9 | 26.9 | 35.0 | 35.0 | 12.5 | 12.5 |
| DEX0477_027.nt.7 | 13661.0 | 20.0 | 20.0 | 26.9 | 26.9 | 35.0 | 35.0 | 12.5 | 12.5 |
| DEX0477_028.nt.1 | 23665.0 | 40.0 | 40.0 | 15.4 | 15.4 | 5.0 | 5.0 | 43.8 | 43.8 |
| DEX0477_028.nt.2 | 23665.0 | 40.0 | 40.0 | 15.4 | 15.4 | 5.0 | 5.0 | 43.8 | 43.8 |
| DEX0477_028.nt.3 | 23665.0 | 40.0 | 40.0 | 15.4 | 15.4 | 5.0 | 5.0 | 43.8 | 43.8 |
| DEX0477_028.nt.4 | 23665.0 | 40.0 | 40.0 | 15.4 | 15.4 | 5.0 | 5.0 | 43.8 | 43.8 |
| DEX0477_029.nt.1 | 23665.0 | 40.0 | 40.0 | 15.4 | 15.4 | 5.0 | 5.0 | 43.8 | 43.8 |
| DEX0477_060.nt.1 | 23646.0 | 60.0 | 66.7 | 53.8 | 53.8 | 70.0 | 73.7 | 37.5 | 37.5 |
| DEX0477_060.nt.1 | 23647.0 | 70.0 | 70.0 | 46.2 | 46.2 | 65.0 | 65.0 | 37.5 | 37.5 |
| DEX0477_060.nt.2 | 23646.0 | 60.0 | 66.7 | 53.8 | 53.8 | 70.0 | 73.7 | 37.5 | 37.5 |
| DEX0477_060.nt.2 | 23647.0 | 70.0 | 70.0 | 46.2 | 46.2 | 65.0 | 65.0 | 37.5 | 37.5 |
| DEX0477_061.nt.1 | 22688.0 | 20.0 | 20.0 | 23.1 | 23.1 | 5.0 | 5.0 | 43.8 | 43.8 |
| DEX0477_061.nt.1 | 22689.0 | 30.0 | 37.5 | 26.9 | 26.9 | 5.0 | 5.3 | 56.2 | 60.0 |
| DEX0477_061.nt.2 | 22688.0 | 20.0 | 20.0 | 23.1 | 23.1 | 5.0 | 5.0 | 43.8 | 43.8 |
| DEX0477_061.nt.2 | 22689.0 | 30.0 | 37.5 | 26.9 | 26.9 | 5.0 | 5.3 | 56.2 | 60.0 |
| DEX0477_064.nt.1 | 14047.0 | 20.0 | 20.0 | 23.1 | 23.1 | 30.0 | 30.0 | 12.5 | 12.5 |
| DEX0477_064.nt.1 | 31772.0 | 30.0 | 30.0 | 23.1 | 23.1 | 35.0 | 35.0 | 12.5 | 12.5 |
| DEX0477_067.nt.1 | 14791.0 | 90.0 | 90.0 | 46.2 | 46.2 | 45.0 | 45.0 | 75.0 | 75.0 |
| DEX0477_069.nt.1 | 27947.0 | [symbol] .0 | 0.0 | 11.5 | 60.0 | 15.0 | 42.9 | 0.0 | 0.0 |
| DEX0477_070.nt.1 | 16104.0 | 30.0 | 30.0 | 57.7 | 60.0 | 35.0 | 36.8 | 68.8 | 68.8 |
| DEX0477_071.nt.1 | 16462.0 | 30.0 | 30.0 | 46.2 | 46.2 | 20.0 | 20.0 | 68.8 | 68.8 |
| DEX0477_071.nt.1 | 16463.0 | 20.0 | 20.0 | 38.5 | 38.5 | 15.0 | 15.0 | 56.2 | 56.2 |
| DEX0477_071.nt.2 | 16462.0 | 30.0 | 30.0 | 46.2 | 46.2 | 20.0 | 20.0 | 68.8 | 68.8 |
| DEX0477_071.nt.2 | 16463.0 | 20.0 | 20.0 | 38.5 | 38.5 | 15.0 | 15.0 | 56.2 | 56.2 |
| DEX0477_072.nt.1 | 18688.0 | 80.0 | 88.9 | 42.3 | 44.0 | 25.0 | 27.8 | 87.5 | 87.5 |
| DEX0477_072.nt.2 | 18688.0 | 80.0 | 88.9 | 42.3 | 44.0 | 25.0 | 27.8 | 87.5 | 87.5 |

[0574] TABLE 4

| | | Mam | Mam Cell | | |
|---|---|---|---|---|---|
| | | Cell | Lines | Mam Cell | Mam Cell Lines |
| | Oligo | Lines | % valid up | Lines 550 | 550 % valid up |
| DEX ID | Name | % up n = 6 | n = 6 | % up n = 6 | n = 6 |
| DEX0477_005.nt.1 | 15805.0 | 33.3 | 33.3 | 50.0 | 50.0 |
| DEX0477_005.nt.1 | 15806.0 | 33.3 | 33.3 | 50.0 | 50.0 |
| DEX0477_010.nt.1 | 15805.0 | 33.3 | 33.3 | 50.0 | 50.0 |
| DEX0477_010.nt.1 | 15806.0 | 33.3 | 33.3 | 50.0 | 50.0 |
| DEX0477_012.nt.1 | 16992.0 | 66.7 | 66.7 | 66.7 | 66.7 |
| DEX0477_012.nt.1 | 20235.0 | 83.3 | 83.3 | 83.3 | 83.3 |
| DEX0477_015.nt.1 | 17244.0 | 16.7 | 20.0 | 33.3 | 33.3 |
| DEX0477_015.nt.1 | 17292.0 | 16.7 | 20.0 | 33.3 | 33.3 |
| DEX0477_015.nt.1 | 20399.0 | 16.7 | 20.0 | 33.3 | 33.3 |
| DEX0477_015.nt.2 | 17244.0 | 16.7 | 20.0 | 33.3 | 33.3 |
| DEX0477_015.nt.2 | 17292.0 | 16.7 | 20.0 | 33.3 | 33.3 |
| DEX0477_015.nt.2 | 20399.0 | 16.7 | 20.0 | 33.3 | 33.3 |
| DEX0477_016.nt.1 | 15232.0 | 33.3 | 50.0 | 33.3 | 100.0 |
| DEX0477_016.nt.1 | 15233.0 | 33.3 | 40.0 | 33.3 | 66.7 |
| DEX0477_016.nt.1 | 33428.0 | 33.3 | 40.0 | 33.3 | 40.0 |
| DEX0477_016.nt.1 | 37143.0 | 33.3 | 33.3 | 33.3 | 33.3 |
| DEX0477_016.nt.1 | 37143.2 | 33.3 | 33.3 | 33.3 | 33.3 |
| DEX0477_016.nt.2 | 15232.0 | 33.3 | 50.0 | 33.3 | 100.0 |
| DEX0477_016.nt.2 | 15233.0 | 33.3 | 40.0 | 33.3 | 66.7 |
| DEX0477_016.nt.2 | 33428.0 | 33.3 | 40.0 | 33.3 | 40.0 |
| DEX0477_016.nt.2 | 37143.0 | 33.3 | 33.3 | 33.3 | 33.3 |
| DEX0477_016.nt.2 | 37143.2 | 33.3 | 33.3 | 33.3 | 33.3 |
| DEX0477_016.nt.4 | 33428.0 | 33.3 | 40.0 | 33.3 | 40.0 |
| DEX0477_016.nt.4 | 37143.0 | 33.3 | 33.3 | 33.3 | 33.3 |
| DEX0477_016.nt.4 | 37143.2 | 33.3 | 33.3 | 33.3 | 33.3 |
| DEX0477_016.nt.5 | 33428.0 | 33.3 | 40.0 | 33.3 | 40.0 |
| DEX0477_016.nt.5 | 37143.0 | 33.3 | 33.3 | 33.3 | 33.3 |
| DEX0477_016.nt.5 | 37143.2 | 33.3 | 33.3 | 33.3 | 33.3 |
| DEX0477_017.nt.1 | 15232.0 | 33.3 | 50.0 | 33.3 | 100.0 |
| DEX0477_017.nt.1 | 15233.0 | 33.3 | 40.0 | 33.3 | 66.7 |
| DEX0477_018.nt.1 | 22280.0 | 33.3 | 33.3 | 33.3 | 33.3 |
| DEX0477_019.nt.1 | 41937.0 | 16.7 | 25.0 | 16.7 | 100.0 |
| DEX0477_019.nt.1 | 41937.2 | 16.7 | 50.0 | 16.7 | 100.0 |
| DEX0477_019.nt.1 | 41938.2 | 16.7 | 50.0 | 16.7 | 50.0 |
| DEX0477_020.nt.1 | 41937.0 | 16.7 | 25.0 | 16.7 | 100.0 |
| DEX0477_020.nt.1 | 41937.2 | 16.7 | 50.0 | 16.7 | 100.0 |
| DEX0477_020.nt.1 | 41938.0 | 16.7 | 50.0 | 0.0 | 0.0 |
| DEX0477_020.nt.1 | 41938.2 | 16.7 | 50.0 | 16.7 | 50.0 |
| DEX0477_020.nt.2 | 41937.0 | 16.7 | 25.0 | 16.7 | 100.0 |
| DEX0477_020.nt.2 | 41937.2 | 16.7 | 50.0 | 16.7 | 100.0 |
| DEX0477_020.nt.2 | 41938.0 | 16.7 | 50.0 | 0.0 | 0.0 |
| DEX0477_020.nt.2 | 41938.2 | 16.7 | 50.0 | 16.7 | 50.0 |
| DEX0477_021.nt.1 | 26770.0 | 66.7 | 80.0 | 66.7 | 80.0 |
| DEX0477_021.nt.1 | 26771.0 | 66.7 | 80.0 | 66.7 | 80.0 |
| DEX0477_021.nt.1 | 27321.0 | 66.7 | 80.0 | 66.7 | 80.0 |
| DEX0477_021.nt.1 | 27322.0 | 66.7 | 80.0 | 66.7 | 80.0 |
| DEX0477_021.nt.1 | 33088.0 | 66.7 | 80.0 | 66.7 | 80.0 |
| DEX0477_021.nt.1 | 33088.2 | 66.7 | 80.0 | 66.7 | 80.0 |
| DEX0477_021.nt.1 | 33089.0 | 66.7 | 80.0 | 66.7 | 80.0 |
| DEX0477_021.nt.1 | 33089.2 | 66.7 | 80.0 | 66.7 | 80.0 |
| DEX0477_021.nt.2 | 26770.0 | 66.7 | 80.0 | 66.7 | 80.0 |
| DEX0477_021.nt.2 | 26771.0 | 66.7 | 80.0 | 66.7 | 80.0 |
| DEX0477_021.nt.2 | 27321.0 | 66.7 | 80.0 | 66.7 | 80.0 |
| DEX0477_021.nt.2 | 27322.0 | 66.7 | 80.0 | 66.7 | 80.0 |
| DEX0477_021.nt.2 | 33088.0 | 66.7 | 80.0 | 66.7 | 80.0 |
| DEX0477_021.nt.2 | 33088.2 | 66.7 | 80.0 | 66.7 | 80.0 |
| DEX0477_021.nt.2 | 33089.0 | 66.7 | 80.0 | 66.7 | 80.0 |
| DEX0477_021.nt.2 | 33089.2 | 66.7 | 80.0 | 66.7 | 80.0 |
| DEX0477_022.nt.1 | 41937.0 | 16.7 | 25.0 | 16.7 | 100.0 |
| DEX0477_022.nt.1 | 41937.2 | 16.7 | 50.0 | 16.7 | 100.0 |
| DEX0477_023.nt.1 | 27321.0 | 66.7 | 80.0 | 66.7 | 80.0 |
| DEX0477_023.nt.1 | 33088.0 | 66.7 | 80.0 | 66.7 | 80.0 |
| DEX0477_023.nt.1 | 33088.2 | 66.7 | 80.0 | 66.7 | 80.0 |
| DEX0477_024.nt.1 | 26770.0 | 66.7 | 80.0 | 66.7 | 80.0 |
| DEX0477_024.nt.1 | 26771.0 | 66.7 | 80.0 | 66.7 | 80.0 |
| DEX0477_024.nt.2 | 26770.0 | 66.7 | 80.0 | 66.7 | 80.0 |
| DEX0477_024.nt.2 | 26771.0 | 66.7 | 80.0 | 66.7 | 80.0 |
| DEX0477_024.nt.3 | 26770.0 | 66.7 | 80.0 | 66.7 | 80.0 |
| DEX0477_024.nt.3 | 26771.0 | 66.7 | 80.0 | 66.7 | 80.0 |
| DEX0477_024.nt.4 | 26770.0 | 66.7 | 80.0 | 66.7 | 80.0 |
| DEX0477_027.nt.5 | 13661.0 | 66.7 | 66.7 | 66.7 | 66.7 |
| DEX0477_027.nt.6 | 13661.0 | 66.7 | 66.7 | 66.7 | 66.7 |
| DEX0477_027.nt.7 | 13661.0 | 66.7 | 66.7 | 66.7 | 66.7 |
| DEX0477_033.nt.1 | 19534.0 | 33.3 | 50.0 | 33.3 | 100.0 |
| DEX0477_033.nt.1 | 19534.2 | 16.7 | 33.3 | 16.7 | 50.0 |
| DEX0477_033.nt.1 | 19535.0 | 33.3 | 33.3 | 33.3 | 50.0 |
| DEX0477_033.nt.1 | 19535.2 | 33.3 | 50.0 | 33.3 | 66.7 |
| DEX0477_033.nt.2 | 19534.0 | 33.3 | 50.0 | 33.3 | 100.0 |
| DEX0477_033.nt.2 | 19534.2 | 16.7 | 33.3 | 16.7 | 50.0 |
| DEX0477_033.nt.2 | 19535.0 | 33.3 | 33.3 | 33.3 | 50.0 |
| DEX0477_033.nt.2 | 19535.2 | 33.3 | 50.0 | 33.3 | 66.7 |
| DEX0477_033.nt.3 | 19534.0 | 33.3 | 50.0 | 33.3 | 100.0 |
| DEX0477_033.nt.3 | 19534.2 | 16.7 | 33.3 | 16.7 | 50.0 |
| DEX0477_033.nt.3 | 19535.0 | 33.3 | 33.3 | 33.3 | 50.0 |
| DEX0477_033.nt.3 | 19535.2 | 33.3 | 50.0 | 33.3 | 66.7 |
| DEX0477_058.nt.1 | 19316.0 | 33.3 | 33.3 | 33.3 | 33.3 |
| DEX0477_058.nt.1 | 19330.0 | 33.3 | 33.3 | 33.3 | 33.3 |
| DEX0477_058.nt.1 | 31704.0 | 66.7 | 66.7 | 66.7 | 66.7 |
| DEX0477_058.nt.1 | 31705.0 | 66.7 | 66.7 | 66.7 | 66.7 |
| DEX0477_058.nt.2 | 31704.0 | 66.7 | 66.7 | 66.7 | 66.7 |
| DEX0477_058.nt.2 | 31705.0 | 66.7 | 66.7 | 66.7 | 66.7 |
| DEX0477_060.nt.1 | 23646.0 | 16.7 | 50.0 | 16.7 | 100.0 |
| DEX0477_060.nt.1 | 23647.0 | 0.0 | 0.0 | 16.7 | 100.0 |
| DEX0477_060.nt.2 | 23646.0 | 16.7 | 50.0 | 16.7 | 100.0 |
| DEX0477_060.nt.2 | 23647.0 | 0.0 | 0.0 | 16.7 | 100.0 |
| DEX0477_062.nt.1 | 22304.0 | 33.3 | 33.3 | 33.3 | 33.3 |
| DEX0477_064.nt.1 | 14047.0 | 50.0 | 50.0 | 50.0 | 50.0 |
| DEX0477_064.nt.1 | 31772.0 | 50.0 | 50.0 | 50.0 | 50.0 |
| DEX0477_067.nt.1 | 14791.0 | 50.0 | 50.0 | 50.0 | 50.0 |
| DEX0477_069.nt.1 | 27947.0 | 33.3 | 50.0 | 33.3 | 66.7 |
| DEX0477_069.nt.1 | 27948.0 | 33.3 | 100.0 | 33.3 | 100.0 |
| DEX0477_070.nt.1 | 16104.0 | 83.3 | 100.0 | 100.0 | 100.0 |
| DEX0477_071.nt.1 | 16462.0 | 50.0 | 50.0 | 50.0 | 50.0 |
| DEX0477_071.nt.1 | 16463.0 | 50.0 | 50.0 | 50.0 | 50.0 |
| DEX0477_071.nt.2 | 16462.0 | 50.0 | 50.0 | 50.0 | 50.0 |
| DEX0477_071.nt.2 | 16463.0 | 50.0 | 50.0 | 50.0 | 50.0 |

[0575] TABLE 5

| | | | | | | | Mam |
|---|---|---|---|---|---|---|---|
| | | Mam | | | | Mam | Multi- |
| | | Multi- | Mam | | Mam | Multi- | Can |
| | | Can | Multi- | Mam | Multi- | Can | ST2, 3 % |
| | | ALL | Can ALL | Multi- | Can ST1 | ST2, 3 | valid |
| | Oligo | % up | % valid | Can ST1 | % valid | % up | up |
| DEX ID | Name | n = 20 | up n = 20 | % up n = 9 | up n = 9 | n = 11 | n = 11 |
| DEX0477_003.nt.1 | 96120.0 | 35.0 | 36.8 | 22.2 | 22.2 | 45.5 | 50.0 |
| DEX0477_003.nt.1 | 96120.1 | 30.0 | 30.0 | 22.2 | 22.2 | 36.4 | 36.4 |
| DEX0477_003.nt.1 | 105624.0 | 35.0 | 35.0 | 22.2 | 22.2 | 45.5 | 45.5 |
| DEX0477_003.nt.1 | 105624.1 | 40.0 | 42.1 | 33.3 | 37.5 | 45.5 | 45.5 |
| DEX0477_003.nt.1 | 105628.0 | 35.0 | 36.8 | 22.2 | 25.0 | 45.5 | 45.5 |
| DEX0477_003.nt.1 | 105628.1 | 30.0 | 33.3 | 22.2 | 22.2 | 36.4 | 44.4 |
| DEX0477_003.nt.2 | 96120.0 | 35.0 | 36.8 | 22.2 | 22.2 | 45.5 | 50.0 |
| DEX0477_003.nt.2 | 96120.1 | 30.0 | 30.0 | 22.2 | 22.2 | 36.4 | 36.4 |
| DEX0477_003.nt.2 | 105624.0 | 35.0 | 35.0 | 22.2 | 22.2 | 45.5 | 45.5 |
| DEX0477_003.nt.2 | 105624.1 | 40.0 | 42.1 | 33.3 | 37.5 | 45.5 | 45.5 |
| DEX0477_003.nt.2 | 105628.0 | 35.0 | 36.8 | 22.2 | 25.0 | 45.5 | 45.5 |
| DEX0477_003.nt.2 | 105628.1 | 30.0 | 33.3 | 22.2 | 22.2 | 36.4 | 44.4 |
| DEX0477_004.nt.1 | 1200.0 | 30.0 | 31.6 | 33.3 | 37.5 | 27.3 | 27.3 |
| DEX0477_004.nt.1 | 1201.0 | 30.0 | 31.6 | 33.3 | 37.5 | 27.3 | 27.3 |
| DEX0477_006.nt.1 | 9744.1 | 15.0 | 15.0 | 33.3 | 33.3 | 0.0 | 0.0 |
| DEX0477_006.nt.1 | 9745.0 | 25.0 | 25.0 | 33.3 | 33.3 | 18.2 | 18.2 |
| DEX0477_006.nt.1 | 9745.1 | 10.0 | 10.0 | 22.2 | 22.2 | 0.0 | 0.0 |
| DEX0477_007.nt.1 | 17852.0 | 10.0 | 20.0 | 22.2 | 50.0 | 0.0 | 0.0 |
| DEX0477_007.nt.1 | 17853.0 | 10.0 | 25.0 | 22.2 | 66.7 | 0.0 | 0.0 |
| DEX0477_007.nt.1 | 17853.1 | 10.0 | 33.3 | 22.2 | 50.0 | 0.0 | 0.0 |
| DEX0477_007.nt.1 | 18645.0 | 10.0 | 33.3 | 22.2 | 66.7 | 0.0 | 0.0 |
| DEX0477_007.nt.1 | 18645.1 | 10.0 | 28.6 | 22.2 | 66.7 | 0.0 | 0.0 |
| DEX0477_007.nt.1 | 18645.2 | 10.0 | 28.6 | 22.2 | 66.7 | 0.0 | 0.0 |
| DEX0477_007.nt.1 | 18645.3 | 10.0 | 20.0 | 22.2 | 66.7 | 0.0 | 0.0 |
| DEX0477_008.nt.1 | 4733.0 | 95.0 | 95.0 | 100.0 | 100.0 | 90.9 | 90.9 |
| DEX0477_008.nt.1 | 4733.1 | 95.0 | 95.0 | 100.0 | 100.0 | 90.9 | 90.9 |
| DEX0477_008.nt.1 | 4734.0 | 90.0 | 90.0 | 100.0 | 100.0 | 81.8 | 81.8 |
| DEX0477_008.nt.1 | 4734.1 | 90.0 | 90.0 | 88.9 | 88.9 | 90.9 | 90.9 |
| DEX0477_009.nt.1 | 990.0 | 35.0 | 35.0 | 33.3 | 33.3 | 36.4 | 36.4 |
| DEX0477_011.nt.1 | 102558.0 | 30.0 | 30.0 | 33.3 | 33.3 | 27.3 | 27.3 |
| DEX0477_011.nt.1 | 102558.1 | 25.0 | 25.0 | 33.3 | 33.3 | 18.2 | 18.2 |
| DEX0477_013.nt.1 | 10549.1 | 20.0 | 20.0 | 33.3 | 33.3 | 9.1 | 9.1 |
| DEX0477_015.nt.1 | 2085.0 | 30.0 | 30.0 | 22.2 | 22.2 | 36.4 | 36.4 |
| DEX0477_015.nt.1 | 4909.0 | 35.0 | 35.0 | 22.2 | 22.2 | 45.5 | 45.5 |
| DEX0477_015.nt.1 | 4909.1 | 30.0 | 30.0 | 22.2 | 22.2 | 36.4 | 36.4 |
| DEX0477_015.nt.1 | 4910.0 | 25.0 | 26.3 | 22.2 | 22.2 | 27.3 | 30.0 |
| DEX0477_015.nt.1 | 4910.1 | 25.0 | 26.3 | 22.2 | 22.2 | 27.3 | 30.0 |
| DEX0477_015.nt.1 | 17292.0 | 35.0 | 35.0 | 22.2 | 22.2 | 45.5 | 45.5 |
| DEX0477_015.nt.1 | 17292.1 | 30.0 | 30.0 | 22.2 | 22.2 | 36.4 | 36.4 |
| DEX0477_015.nt.1 | 17293.0 | 25.0 | 26.3 | 22.2 | 22.2 | 27.3 | 30.0 |
| DEX0477_015.nt.1 | 17293.1 | 30.0 | 30.0 | 22.2 | 22.2 | 36.4 | 36.4 |
| DEX0477_015.nt.1 | 24404.0 | 30.0 | 30.0 | 22.2 | 22.2 | 36.4 | 36.4 |
| DEX0477_015.nt.1 | 24404.1 | 30.0 | 30.0 | 22.2 | 22.2 | 36.4 | 36.4 |
| DEX0477_015.nt.1 | 24405.0 | 25.0 | 26.3 | 22.2 | 22.2 | 27.3 | 30.0 |
| DEX0477_015.nt.1 | 24405.1 | 25.0 | 26.3 | 22.2 | 22.2 | 27.3 | 30.0 |
| DEX0477_015.nt.2 | 2085.0 | 30.0 | 30.0 | 22.2 | 22.2 | 36.4 | 36.4 |
| DEX0477_015.nt.2 | 4909.0 | 35.0 | 35.0 | 22.2 | 22.2 | 45.5 | 45.5 |
| DEX0477_015.nt.2 | 4909.1 | 30.0 | 30.0 | 22.2 | 22.2 | 36.4 | 36.4 |
| DEX0477_015.nt.2 | 4910.0 | 25.0 | 26.3 | 22.2 | 22.2 | 27.3 | 30.0 |
| DEX0477_015.nt.2 | 4910.1 | 25.0 | 26.3 | 22.2 | 22.2 | 27.3 | 30.0 |
| DEX0477_015.nt.2 | 17292.0 | 35.0 | 35.0 | 22.2 | 22.2 | 45.5 | 45.5 |
| DEX0477_015.nt.2 | 17292.1 | 30.0 | 30.0 | 22.2 | 22.2 | 36.4 | 36.4 |
| DEX0477_015.nt.2 | 17293.0 | 25.0 | 26.3 | 22.2 | 22.2 | 27.3 | 30.0 |
| DEX0477_015.nt.2 | 17293.1 | 30.0 | 30.0 | 22.2 | 22.2 | 36.4 | 36.4 |
| DEX0477_015.nt.2 | 24404.0 | 30.0 | 30.0 | 22.2 | 22.2 | 36.4 | 36.4 |
| DEX0477_015.nt.2 | 24404.1 | 30.0 | 30.0 | 22.2 | 22.2 | 36.4 | 36.4 |
| DEX0477_016.nt.1 | 33429.0 | 25.0 | 35.7 | 11.1 | 16.7 | 36.4 | 50.0 |
| DEX0477_016.nt.1 | 33429.1 | 25.0 | 25.0 | 11.1 | 11.1 | 36.4 | 36.4 |
| DEX0477_016.nt.1 | 37143.0 | 25.0 | 25.0 | 11.1 | 11.1 | 36.4 | 36.4 |
| DEX0477_016.nt.1 | 37143.1 | 25.0 | 25.0 | 11.1 | 11.1 | 36.4 | 36.4 |
| DEX0477_016.nt.1 | 37143.2 | 25.0 | 25.0 | 11.1 | 11.1 | 36.4 | 36.4 |
| DEX0477_016.nt.1 | 37143.3 | 25.0 | 25.0 | 11.1 | 11.1 | 36.4 | 36.4 |
| DEX0477_016.nt.1 | 37143.4 | 25.0 | 25.0 | 11.1 | 11.1 | 36.4 | 36.4 |
| DEX0477_016.nt.1 | 39533.0 | 25.0 | 25.0 | 11.1 | 11.1 | 36.4 | 36.4 |
| DEX0477_016.nt.1 | 39533.1 | 25.0 | 25.0 | 11.1 | 11.1 | 36.4 | 36.4 |
| DEX0477_016.nt.1 | 39534.0 | 25.0 | 25.0 | 11.1 | 11.1 | 36.4 | 36.4 |
| DEX0477_016.nt.1 | 39534.1 | 25.0 | 25.0 | 11.1 | 11.1 | 36.4 | 36.4 |
| DEX0477_016.nt.2 | 33428.0 | 25.0 | 25.0 | 11.1 | 11.1 | 36.4 | 36.4 |
| DEX0477_016.nt.2 | 33428.1 | 25.0 | 25.0 | 11.1 | 11.1 | 36.4 | 36.4 |
| DEX0477_016.nt.2 | 33429.0 | 25.0 | 35.7 | 11.1 | 16.7 | 36.4 | 50.0 |
| DEX0477_016.nt.2 | 33429.1 | 25.0 | 25.0 | 11.1 | 11.1 | 36.4 | 36.4 |
| DEX0477_016.nt.2 | 37143.0 | 25.0 | 25.0 | 11.1 | 11.1 | 36.4 | 36.4 |
| DEX0477_016.nt.2 | 37143.1 | 25.0 | 25.0 | 11.1 | 11.1 | 36.4 | 36.4 |
| DEX0477_016.nt.2 | 37143.2 | 25.0 | 25.0 | 11.1 | 11.1 | 36.4 | 36.4 |
| DEX0477_016.nt.2 | 37143.3 | 25.0 | 25.0 | 11.1 | 11.1 | 36.4 | 36.4 |
| DEX0477_016.nt.2 | 37143.4 | 25.0 | 25.0 | 11.1 | 11.1 | 36.4 | 36.4 |
| DEX0477_016.nt.2 | 39533.0 | 25.0 | 25.0 | 11.1 | 11.1 | 36.4 | 36.4 |
| DEX0477_016.nt.2 | 39533.1 | 25.0 | 25.0 | 11.1 | 11.1 | 36.4 | 36.4 |
| DEX0477_016.nt.2 | 39534.0 | 25.0 | 25.0 | 11.1 | 11.1 | 36.4 | 36.4 |
| DEX0477_016.nt.2 | 39534.1 | 25.0 | 25.0 | 11.1 | 11.1 | 36.4 | 36.4 |
| DEX0477_016.nt.4 | 33428.0 | 25.0 | 25.0 | 11.1 | 11.1 | 36.4 | 36.4 |
| DEX0477_016.nt.4 | 33428.1 | 25.0 | 25.0 | 11.1 | 11.1 | 36.4 | 36.4 |
| DEX0477_016.nt.4 | 33429.0 | 25.0 | 35.7 | 11.1 | 16.7 | 36.4 | 50.0 |
| DEX0477_016.nt.4 | 33429.1 | 25.0 | 25.0 | 11.1 | 11.1 | 36.4 | 36.4 |
| DEX0477_016.nt.4 | 37143.0 | 25.0 | 25.0 | 11.1 | 11.1 | 36.4 | 36.4 |
| DEX0477_016.nt.4 | 37143.1 | 25.0 | 25.0 | 11.1 | 11.1 | 36.4 | 36.4 |
| DEX0477_016.nt.4 | 37143.2 | 25.0 | 25.0 | 11.1 | 11.1 | 36.4 | 36.4 |
| DEX0477_016.nt.4 | 37143.3 | 25.0 | 25.0 | 11.1 | 11.1 | 36.4 | 36.4 |
| DEX0477_016.nt.4 | 37143.4 | 25.0 | 25.0 | 11.1 | 11.1 | 36.4 | 36.4 |
| DEX0477_016.nt.4 | 39533.0 | 25.0 | 25.0 | 11.1 | 11.1 | 36.4 | 36.4 |
| DEX0477_016.nt.4 | 39533.1 | 25.0 | 25.0 | 11.1 | 11.1 | 36.4 | 36.4 |
| DEX0477_016.nt.4 | 39534.0 | 25.0 | 25.0 | 11.1 | 11.1 | 36.4 | 36.4 |
| DEX0477_016.nt.4 | 39534.1 | 25.0 | 25.0 | 11.1 | 11.1 | 36.4 | 36.4 |
| DEX0477_016.nt.5 | 33428.0 | 25.0 | 25.0 | 11.1 | 11.1 | 36.4 | 36.4 |
| DEX0477_016.nt.5 | 33428.1 | 25.0 | 25.0 | 11.1 | 11.1 | 36.4 | 36.4 |
| DEX0477_016.nt.5 | 33429.0 | 25.0 | 35.7 | 11.1 | 16.7 | 36.4 | 50.0 |
| DEX0477_016.nt.5 | 33429.1 | 25.0 | 25.0 | 11.1 | 11.1 | 36.4 | 36.4 |
| DEX0477_016.nt.5 | 37143.0 | 25.0 | 25.0 | 11.1 | 11.1 | 36.4 | 36.4 |
| DEX0477_016.nt.5 | 37143.1 | 25.0 | 25.0 | 11.1 | 11.1 | 36.4 | 36.4 |
| DEX0477_016.nt.5 | 37143.2 | 25.0 | 25.0 | 11.1 | 11.1 | 36.4 | 36.4 |
| DEX0477_016.nt.5 | 37143.3 | 25.0 | 25.0 | 11.1 | 11.1 | 36.4 | 36.4 |
| DEX0477_016.nt.5 | 37143.4 | 25.0 | 25.0 | 11.1 | 11.1 | 36.4 | 36.4 |
| DEX0477_016.nt.5 | 39533.0 | 25.0 | 25.0 | 11.1 | 11.1 | 36.4 | 36.4 |
| DEX0477_016.nt.5 | 39533.1 | 25.0 | 25.0 | 11.1 | 11.1 | 36.4 | 36.4 |
| DEX0477_016.nt.5 | 39534.0 | 25.0 | 25.0 | 11.1 | 11.1 | 36.4 | 36.4 |
| DEX0477_016.nt.5 | 39534.1 | 25.0 | 25.0 | 11.1 | 11.1 | 36.4 | 36.4 |
| DEX0477_018.nt.1 | 102557.0 | 25.0 | 25.0 | 33.3 | 33.3 | 18.2 | 18.2 |
| DEX0477_018.nt.1 | 102558.0 | 30.0 | 30.0 | 33.3 | 33.3 | 27.3 | 27.3 |
| DEX0477_018.nt.1 | 102558.1 | 25.0 | 25.0 | 33.3 | 33.3 | 18.2 | 18.2 |
| DEX0477_019.nt.1 | 41937.0 | 30.0 | 60.0 | 22.2 | 66.7 | 36.4 | 57.1 |
| DEX0477_019.nt.1 | 41937.1 | 30.0 | 66.7 | 22.2 | 66.7 | 36.4 | 66.7 |
| DEX0477_019.nt.1 | 41937.2 | 30.0 | 60.0 | 22.2 | 66.7 | 36.4 | 57.1 |
| DEX0477_019.nt.1 | 41938.0 | 25.0 | 33.3 | 11.1 | 20.0 | 36.4 | 40.0 |
| DEX0477_019.nt.1 | 41938.1 | 30.0 | 42.9 | 22.2 | 40.0 | 36.4 | 44.4 |
| DEX0477_019.nt.1 | 41938.2 | 35.0 | 50.0 | 22.2 | 33.3 | 45.5 | 62.5 |
| DEX0477_019.nt.1 | 41939.0 | 30.0 | 33.3 | 22.2 | 25.0 | 36.4 | 40.0 |
| DEX0477_019.nt.1 | 41939.1 | 30.0 | 46.2 | 22.2 | 40.0 | 36.4 | 50.0 |
| DEX0477_019.nt.1 | 41939.2 | 30.0 | 33.3 | 22.2 | 28.6 | 36.4 | 36.4 |
| DEX0477_019.nt.1 | 41940.0 | 30.0 | 37.5 | 22.2 | 33.3 | 36.4 | 40.0 |
| DEX0477_019.nt.1 | 41940.1 | 25.0 | 27.8 | 22.2 | 28.6 | 27.3 | 27.3 |
| DEX0477_019.nt.1 | 41940.2 | 30.0 | 40.0 | 22.2 | 33.3 | 36.4 | 44.4 |
| DEX0477_019.nt.1 | 78627.0 | 20.0 | 57.1 | 22.2 | 66.7 | 18.2 | 50.0 |
| DEX0477_019.nt.1 | 78627.1 | 30.0 | 66.7 | 22.2 | 66.7 | 36.4 | 66.7 |
| DEX0477_019.nt.1 | 78628.0 | 20.0 | 66.7 | 22.2 | 100.0 | 18.2 | 50.0 |
| DEX0477_019.nt.1 | 78628.1 | 30.0 | 66.7 | 22.2 | 66.7 | 36.4 | 66.7 |
| DEX0477_019.nt.1 | 94127.0 | 20.0 | 50.0 | 11.1 | 33.3 | 27.3 | 60.0 |
| DEX0477_019.nt.1 | 94127.1 | 30.0 | 50.0 | 22.2 | 50.0 | 36.4 | 50.0 |
| DEX0477_019.nt.1 | 94128.0 | 40.0 | 61.5 | 22.2 | 40.0 | 54.5 | 75.0 |
| DEX0477_019.nt.1 | 94128.1 | 40.0 | 61.5 | 22.2 | 40.0 | 54.5 | 75.0 |
| DEX0477_019.nt.1 | 102785.0 | 30.0 | 54.5 | 22.2 | 50.0 | 36.4 | 57.1 |
| DEX0477_019.nt.1 | 102785.1 | 15.0 | 42.9 | 11.1 | 50.0 | 18.2 | 40.0 |
| DEX0477_019.nt.1 | 102786.0 | 35.0 | 50.0 | 22.2 | 33.3 | 45.5 | 62.5 |
| DEX0477_019.nt.1 | 102786.1 | 40.0 | 61.5 | 22.2 | 40.0 | 54.5 | 75.0 |
| DEX0477_019.nt.1 | 102787.0 | 35.0 | 38.9 | 22.2 | 25.0 | 45.5 | 50.0 |
| DEX0477_019.nt.1 | 102787.1 | 35.0 | 41.2 | 22.2 | 25.0 | 45.5 | 55.6 |
| DEX0477_019.nt.1 | 102789.0 | 40.0 | 61.5 | 22.2 | 40.0 | 54.5 | 75.0 |
| DEX0477_019.nt.1 | 102789.1 | 40.0 | 72.7 | 22.2 | 50.0 | 54.5 | 85.7 |
| DEX0477_020.nt.1 | 41937.0 | 30.0 | 60.0 | 22.2 | 66.7 | 36.4 | 57.1 |
| DEX0477_020.nt.1 | 41937.1 | 30.0 | 66.7 | 22.2 | 66.7 | 36.4 | 66.7 |
| DEX0477_020.nt.1 | 41937.2 | 30.0 | 60.0 | 22.2 | 66.7 | 36.4 | 57.1 |
| DEX0477_020.nt.1 | 41938.0 | 25.0 | 33.3 | 11.1 | 20.0 | 36.4 | 40.0 |
| DEX0477_020.nt.1 | 41938.1 | 30.0 | 42.9 | 22.2 | 40.0 | 36.4 | 44.4 |
| DEX0477_020.nt.1 | 41938.2 | 35.0 | 50.0 | 22.2 | 33.3 | 45.5 | 62.5 |
| DEX0477_020.nt.1 | 41939.0 | 30.0 | 33.3 | 22.2 | 25.0 | 36.4 | 40.0 |
| DEX0477_020.nt.1 | 41939.1 | 30.0 | 46.2 | 22.2 | 40.0 | 36.4 | 50.0 |
| DEX0477_020.nt.1 | 41939.2 | 30.0 | 33.3 | 22.2 | 28.6 | 36.4 | 36.4 |
| DEX0477_020.nt.1 | 41940.0 | 30.0 | 37.5 | 22.2 | 33.3 | 36.4 | 40.0 |
| DEX0477_020.nt.1 | 41940.1 | 25.0 | 27.8 | 22.2 | 28.6 | 27.3 | 27.3 |
| DEX0477_020.nt.1 | 41940.2 | 30.0 | 40.0 | 22.2 | 33.3 | 36.4 | 44.4 |
| DEX0477_020.nt.1 | 78627.0 | 20.0 | 57.1 | 22.2 | 66.7 | 18.2 | 50.0 |
| DEX0477_020.nt.1 | 78627.1 | 30.0 | 66.7 | 22.2 | 66.7 | 36.4 | 66.7 |
| DEX0477_020.nt.1 | 78628.0 | 20.0 | 66.7 | 22.2 | 100.0 | 18.2 | 50.0 |
| DEX0477_020.nt.1 | 78628.1 | 30.0 | 66.7 | 22.2 | 66.7 | 36.4 | 66.7 |
| DEX0477_020.nt.1 | 94128.0 | 40.0 | 61.5 | 22.2 | 40.0 | 54.5 | 75.0 |
| DEX0477_020.nt.1 | 94128.1 | 40.0 | 61.5 | 22.2 | 40.0 | 54.5 | 75.0 |
| DEX0477_020.nt.1 | 102786.0 | 35.0 | 50.0 | 22.2 | 33.3 | 45.5 | 62.5 |
| DEX0477_020.nt.1 | 102786.1 | 40.0 | 61.5 | 22.2 | 40.0 | 54.5 | 75.0 |
| DEX0477_020.nt.1 | 102787.0 | 35.0 | 38.9 | 22.2 | 25.0 | 45.5 | 50.0 |
| DEX0477_020.nt.1 | 102787.1 | 35.0 | 41.2 | 22.2 | 25.0 | 45.5 | 55.6 |
| DEX0477_020.nt.1 | 102789.0 | 40.0 | 61.5 | 22.2 | 40.0 | 54.5 | 75.0 |
| DEX0477_020.nt.1 | 102789.1 | 40.0 | 72.7 | 22.2 | 50.0 | 54.5 | 85.7 |
| DEX0477_020.nt.2 | 41937.0 | 30.0 | 60.0 | 22.2 | 66.7 | 36.4 | 57.1 |
| DEX0477_020.nt.2 | 41937.1 | 30.0 | 66.7 | 22.2 | 66.7 | 36.4 | 66.7 |
| DEX0477_020.nt.2 | 41937.2 | 30.0 | 60.0 | 22.2 | 66.7 | 36.4 | 57.1 |
| DEX0477_020.nt.2 | 41938.0 | 25.0 | 33.3 | 11.1 | 20.0 | 36.4 | 40.0 |
| DEX0477_020.nt.2 | 41938.1 | 30.0 | 42.9 | 22.2 | 40.0 | 36.4 | 44.4 |
| DEX0477_020.nt.2 | 41938.2 | 35.0 | 50.0 | 22.2 | 33.3 | 45.5 | 62.5 |
| DEX0477_020.nt.2 | 41939.0 | 30.0 | 33.3 | 22.2 | 25.0 | 36.4 | 40.0 |
| DEX0477_020.nt.2 | 41939.1 | 30.0 | 46.2 | 22.2 | 40.0 | 36.4 | 50.0 |
| DEX0477_020.nt.2 | 41939.2 | 30.0 | 33.3 | 22.2 | 28.6 | 36.4 | 36.4 |
| DEX0477_020.nt.2 | 41940.0 | 30.0 | 37.5 | 22.2 | 33.3 | 36.4 | 40.0 |
| DEX0477_020.nt.2 | 41940.1 | 25.0 | 27.8 | 22.2 | 28.6 | 27.3 | 27.3 |
| DEX0477_020.nt.2 | 41940.2 | 30.0 | 40.0 | 22.2 | 33.3 | 36.4 | 44.4 |
| DEX0477_020.nt.2 | 78627.0 | 20.0 | 57.1 | 22.2 | 66.7 | 18.2 | 50.0 |
| DEX0477_020.nt.2 | 78627.1 | 30.0 | 66.7 | 22.2 | 66.7 | 36.4 | 66.7 |
| DEX0477_020.nt.2 | 78628.0 | 20.0 | 66.7 | 22.2 | 100.0 | 18.2 | 50.0 |
| DEX0477_020.nt.2 | 78628.1 | 30.0 | 66.7 | 22.2 | 66.7 | 36.4 | 66.7 |
| DEX0477_020.nt.2 | 94128.0 | 40.0 | 61.5 | 22.2 | 40.0 | 54.5 | 75.0 |
| DEX0477_020.nt.2 | 94128.1 | 40.0 | 61.5 | 22.2 | 40.0 | 54.5 | 75.0 |
| DEX0477_020.nt.2 | 102786.0 | 35.0 | 50.0 | 22.2 | 33.3 | 45.5 | 62.5 |
| DEX0477_020.nt.2 | 102786.1 | 40.0 | 61.5 | 22.2 | 40.0 | 54.5 | 75.0 |
| DEX0477_020.nt.2 | 102787.0 | 35.0 | 38.9 | 22.2 | 25.0 | 45.5 | 50.0 |
| DEX0477_020.nt.2 | 102787.1 | 35.0 | 41.2 | 22.2 | 25.0 | 45.5 | 55.6 |
| DEX0477_020.nt.2 | 102789.0 | 40.0 | 61.5 | 22.2 | 40.0 | 54.5 | 75.0 |
| DEX0477_020.nt.2 | 102789.1 | 40.0 | 72.7 | 22.2 | 50.0 | 54.5 | 85.7 |
| DEX0477_021.nt.1 | 26770.0 | 70.0 | 70.0 | 55.6 | 55.6 | 81.8 | 81.8 |
| DEX0477_021.nt.1 | 26770.1 | 70.0 | 73.7 | 55.6 | 62.5 | 81.8 | 81.8 |
| DEX0477_021.nt.1 | 26771.0 | 70.0 | 73.7 | 55.6 | 62.5 | 81.8 | 81.8 |
| DEX0477_021.nt.1 | 26771.1 | 70.0 | 77.8 | 55.6 | 71.4 | 81.8 | 81.8 |
| DEX0477_021.nt.1 | 33088.0 | 70.0 | 70.0 | 55.6 | 55.6 | 81.8 | 81.8 |
| DEX0477_021.nt.1 | 33088.1 | 70.0 | 70.0 | 55.6 | 55.6 | 81.8 | 81.8 |
| DEX0477_021.nt.1 | 33088.2 | 70.0 | 77.8 | 55.6 | 71.4 | 81.8 | 81.8 |
| DEX0477_021.nt.1 | 33088.3 | 70.0 | 77.8 | 55.6 | 71.4 | 81.8 | 81.8 |
| DEX0477_021.nt.1 | 33089.0 | 70.0 | 77.8 | 55.6 | 71.4 | 81.8 | 81.8 |
| DEX0477_021.nt.1 | 33089.1 | 70.0 | 77.8 | 55.6 | 71.4 | 81.8 | 81.8 |
| DEX0477_021.nt.1 | 33089.2 | 55.0 | 73.3 | 33.3 | 60.0 | 72.7 | 80.0 |
| DEX0477_021.nt.1 | 33089.3 | 70.0 | 77.8 | 55.6 | 71.4 | 81.8 | 81.8 |
| DEX0477_021.nt.1 | 41945.0 | 65.0 | 72.2 | 44.4 | 57.1 | 81.8 | 81.8 |
| DEX0477_021.nt.1 | 41945.1 | 65.0 | 76.5 | 44.4 | 66.7 | 81.8 | 81.8 |
| DEX0477_021.nt.1 | 41945.2 | 70.0 | 77.8 | 55.6 | 71.4 | 81.8 | 81.8 |
| DEX0477_021.nt.1 | 41945.3 | 70.0 | 77.8 | 55.6 | 71.4 | 81.8 | 81.8 |
| DEX0477_021.nt.1 | 41945.4 | 70.0 | 77.8 | 55.6 | 71.4 | 81.8 | 81.8 |
| DEX0477_021.nt.1 | 41946.0 | 65.0 | 76.5 | 44.4 | 57.1 | 81.8 | 90.0 |
| DEX0477_021.nt.1 | 41946.1 | 70.0 | 77.8 | 55.6 | 71.4 | 81.8 | 81.8 |
| DEX0477_021.nt.1 | 41946.2 | 70.0 | 77.8 | 55.6 | 71.4 | 81.8 | 81.8 |
| DEX0477_021.nt.1 | 41946.3 | 70.0 | 77.8 | 55.6 | 71.4 | 81.8 | 81.8 |
| DEX0477_021.nt.1 | 41946.4 | 70.0 | 77.8 | 55.6 | 71.4 | 81.8 | 81.8 |
| DEX0477_021.nt.2 | 26770.0 | 70.0 | 70.0 | 55.6 | 55.6 | 81.8 | 81.8 |
| DEX0477_021.nt.2 | 26770.1 | 70.0 | 73.7 | 55.6 | 62.5 | 81.8 | 81.8 |
| DEX0477_021.nt.2 | 26771.0 | 70.0 | 73.7 | 55.6 | 62.5 | 81.8 | 81.8 |
| DEX0477_021.nt.2 | 26771.1 | 70.0 | 77.8 | 55.6 | 71.4 | 81.8 | 81.8 |
| DEX0477_021.nt.2 | 33088.0 | 70.0 | 70.0 | 55.6 | 55.6 | 81.8 | 81.8 |
| DEX0477_021.nt.2 | 33088.1 | 70.0 | 70.0 | 55.6 | 55.6 | 81.8 | 81.8 |
| DEX0477_021.nt.2 | 33088.2 | 70.0 | 77.8 | 55.6 | 71.4 | 81.8 | 81.8 |
| DEX0477_021.nt.2 | 33088.3 | 70.0 | 77.8 | 55.6 | 71.4 | 81.8 | 81.8 |
| DEX0477_021.nt.2 | 33089.0 | 70.0 | 77.8 | 55.6 | 71.4 | 81.8 | 81.8 |
| DEX0477_021.nt.2 | 33089.1 | 70.0 | 77.8 | 55.6 | 71.4 | 81.8 | 81.8 |
| DEX0477_021.nt.2 | 33089.2 | 55.0 | 73.3 | 33.3 | 60.0 | 72.7 | 80.0 |
| DEX0477_021.nt.2 | 33089.3 | 70.0 | 77.8 | 55.6 | 71.4 | 81.8 | 81.8 |
| DEX0477_021.nt.2 | 41945.0 | 65.0 | 72.2 | 44.4 | 57.1 | 81.8 | 81.8 |
| DEX0477_021.nt.2 | 41945.1 | 65.0 | 76.5 | 44.4 | 66.7 | 81.8 | 81.8 |
| DEX0477_021.nt.2 | 41945.2 | 70.0 | 77.8 | 55.6 | 71.4 | 81.8 | 81.8 |
| DEX0477_021.nt.2 | 41945.3 | 70.0 | 77.8 | 55.6 | 71.4 | 81.8 | 81.8 |
| DEX0477_021.nt.2 | 41945.4 | 70.0 | 77.8 | 55.6 | 71.4 | 81.8 | 81.8 |
| DEX0477_021.nt.2 | 41946.0 | 65.0 | 76.5 | 44.4 | 57.1 | 81.8 | 90.0 |
| DEX0477_021.nt.2 | 41946.1 | 70.0 | 77.8 | 55.6 | 71.4 | 81.8 | 81.8 |
| DEX0477_021.nt.2 | 41946.2 | 70.0 | 77.8 | 55.6 | 71.4 | 81.8 | 81.8 |
| DEX0477_021.nt.2 | 41946.3 | 70.0 | 77.8 | 55.6 | 71.4 | 81.8 | 81.8 |
| DEX0477_021.nt.2 | 41946.4 | 70.0 | 77.8 | 55.6 | 71.4 | 81.8 | 81.8 |
| DEX0477_022.nt.1 | 41937.0 | 30.0 | 60.0 | 22.2 | 66.7 | 36.4 | 57.1 |
| DEX0477_022.nt.1 | 41937.1 | 30.0 | 66.7 | 22.2 | 66.7 | 36.4 | 66.7 |
| DEX0477_022.nt.1 | 41937.2 | 30.0 | 60.0 | 22.2 | 66.7 | 36.4 | 57.1 |
| DEX0477_022.nt.1 | 41939.0 | 30.0 | 33.3 | 22.2 | 25.0 | 36.4 | 40.0 |
| DEX0477_022.nt.1 | 41939.1 | 30.0 | 46.2 | 22.2 | 40.0 | 36.4 | 50.0 |
| DEX0477_022.nt.1 | 41939.2 | 30.0 | 33.3 | 22.2 | 28.6 | 36.4 | 36.4 |
| DEX0477_022.nt.1 | 41940.0 | 30.0 | 37.5 | 22.2 | 33.3 | 36.4 | 40.0 |
| DEX0477_022.nt.1 | 41940.1 | 25.0 | 27.8 | 22.2 | 28.6 | 27.3 | 27.3 |
| DEX0477_022.nt.1 | 41940.2 | 30.0 | 40.0 | 22.2 | 33.3 | 36.4 | 44.4 |
| DEX0477_022.nt.1 | 78627.0 | 20.0 | 57.1 | 22.2 | 66.7 | 18.2 | 50.0 |
| DEX0477_022.nt.1 | 78627.1 | 30.0 | 66.7 | 22.2 | 66.7 | 36.4 | 66.7 |
| DEX0477_022.nt.1 | 78628.0 | 20.0 | 66.7 | 22.2 | 100.0 | 18.2 | 50.0 |
| DEX0477_022.nt.1 | 78628.1 | 30.0 | 66.7 | 22.2 | 66.7 | 36.4 | 66.7 |
| DEX0477_023.nt.1 | 33088.0 | 70.0 | 70.0 | 55.6 | 55.6 | 81.8 | 81.8 |
| DEX0477_023.nt.1 | 33088.1 | 70.0 | 70.0 | 55.6 | 55.6 | 81.8 | 81.8 |
| DEX0477_023.nt.1 | 33088.2 | 70.0 | 77.8 | 55.6 | 71.4 | 81.8 | 81.8 |
| DEX0477_023.nt.1 | 33088.3 | 70.0 | 77.8 | 55.6 | 71.4 | 81.8 | 81.8 |
| DEX0477_024.nt.1 | 26770.0 | 70.0 | 70.0 | 55.6 | 55.6 | 81.8 | 81.8 |
| DEX0477_024.nt.1 | 26770.1 | 70.0 | 73.7 | 55.6 | 62.5 | 81.8 | 81.8 |
| DEX0477_024.nt.1 | 26771.0 | 70.0 | 73.7 | 55.6 | 62.5 | 81.8 | 81.8 |
| DEX0477_024.nt.1 | 26771.1 | 70.0 | 77.8 | 55.6 | 71.4 | 81.8 | 81.8 |
| DEX0477_024.nt.1 | 41945.0 | 65.0 | 72.2 | 44.4 | 57.1 | 81.8 | 81.8 |
| DEX0477_024.nt.1 | 41945.1 | 65.0 | 76.5 | 44.4 | 66.7 | 81.8 | 81.8 |
| DEX0477_024.nt.1 | 41945.2 | 70.0 | 77.8 | 55.6 | 71.4 | 81.8 | 81.8 |
| DEX0477_024.nt.1 | 41945.3 | 70.0 | 77.8 | 55.6 | 71.4 | 81.8 | 81.8 |
| DEX0477_024.nt.1 | 41945.4 | 70.0 | 77.8 | 55.6 | 71.4 | 81.8 | 81.8 |
| DEX0477_024.nt.1 | 41946.0 | 65.0 | 76.5 | 44.4 | 57.1 | 81.8 | 90.0 |
| DEX0477_024.nt.1 | 41946.1 | 70.0 | 77.8 | 55.6 | 71.4 | 81.8 | 81.8 |
| DEX0477_024.nt.1 | 41946.2 | 70.0 | 77.8 | 55.6 | 71.4 | 81.8 | 81.8 |
| DEX0477_024.nt.1 | 41946.3 | 70.0 | 77.8 | 55.6 | 71.4 | 81.8 | 81.8 |
| DEX0477_024.nt.1 | 41946.4 | 70.0 | 77.8 | 55.6 | 71.4 | 81.8 | 81.8 |
| DEX0477_024.nt.2 | 26770.0 | 70.0 | 70.0 | 55.6 | 55.6 | 81.8 | 81.8 |
| DEX0477_024.nt.2 | 26770.1 | 70.0 | 73.7 | 55.6 | 62.5 | 81.8 | 81.8 |
| DEX0477_024.nt.2 | 26771.0 | 70.0 | 73.7 | 55.6 | 62.5 | 81.8 | 81.8 |
| DEX0477_024.nt.2 | 26771.1 | 70.0 | 77.8 | 55.6 | 71.4 | 81.8 | 81.8 |
| DEX0477_024.nt.2 | 41945.0 | 65.0 | 72.2 | 44.4 | 57.1 | 81.8 | 81.8 |
| DEX0477_024.nt.2 | 41945.1 | 65.0 | 76.5 | 44.4 | 66.7 | 81.8 | 81.8 |
| DEX0477_024.nt.2 | 41945.2 | 70.0 | 77.8 | 55.6 | 71.4 | 81.8 | 81.8 |
| DEX0477_024.nt.2 | 41945.3 | 70.0 | 77.8 | 55.6 | 71.4 | 81.8 | 81.8 |
| DEX0477_024.nt.2 | 41945.4 | 70.0 | 77.8 | 55.6 | 71.4 | 81.8 | 81.8 |
| DEX0477_024.nt.2 | 41946.0 | 65.0 | 76.5 | 44.4 | 57.1 | 81.8 | 90.0 |
| DEX0477_024.nt.2 | 41946.1 | 70.0 | 77.8 | 55.6 | 71.4 | 81.8 | 81.8 |
| DEX0477_024.nt.2 | 41946.2 | 70.0 | 77.8 | 55.6 | 71.4 | 81.8 | 81.8 |
| DEX0477_024.nt.2 | 41946.3 | 70.0 | 77.8 | 55.6 | 71.4 | 81.8 | 81.8 |
| DEX0477_024.nt.2 | 41946.4 | 70.0 | 77.8 | 55.6 | 71.4 | 81.8 | 81.8 |
| DEX0477_024.nt.3 | 26770.0 | 70.0 | 70.0 | 55.6 | 55.6 | 81.8 | 81.8 |
| DEX0477_024.nt.3 | 26770.1 | 70.0 | 73.7 | 55.6 | 62.5 | 81.8 | 81.8 |
| DEX0477_024.nt.3 | 26771.0 | 70.0 | 73.7 | 55.6 | 62.5 | 81.8 | 81.8 |
| DEX0477_024.nt.3 | 26771.1 | 70.0 | 77.8 | 55.6 | 71.4 | 81.8 | 81.8 |
| DEX0477_024.nt.3 | 41945.0 | 65.0 | 72.2 | 44.4 | 57.1 | 81.8 | 81.8 |
| DEX0477_024.nt.3 | 41945.1 | 65.0 | 76.5 | 44.4 | 66.7 | 81.8 | 81.8 |
| DEX0477_024.nt.3 | 41945.2 | 70.0 | 77.8 | 55.6 | 71.4 | 81.8 | 81.8 |
| DEX0477_024.nt.3 | 41945.3 | 70.0 | 77.8 | 55.6 | 71.4 | 81.8 | 81.8 |
| DEX0477_024.nt.3 | 41945.4 | 70.0 | 77.8 | 55.6 | 71.4 | 81.8 | 81.8 |
| DEX0477_024.nt.3 | 41946.0 | 65.0 | 76.5 | 44.4 | 57.1 | 81.8 | 90.0 |
| DEX0477_024.nt.3 | 41946.1 | 70.0 | 77.8 | 55.6 | 71.4 | 81.8 | 81.8 |
| DEX0477_024.nt.3 | 41946.2 | 70.0 | 77.8 | 55.6 | 71.4 | 81.8 | 81.8 |
| DEX0477_024.nt.3 | 41946.3 | 70.0 | 77.8 | 55.6 | 71.4 | 81.8 | 81.8 |
| DEX0477_024.nt.3 | 41946.4 | 70.0 | 77.8 | 55.6 | 71.4 | 81.8 | 81.8 |
| DEX0477_024.nt.4 | 26770.0 | 70.0 | 70.0 | 55.6 | 55.6 | 81.8 | 81.8 |
| DEX0477_024.nt.4 | 26770.1 | 70.0 | 73.7 | 55.6 | 62.5 | 81.8 | 81.8 |
| DEX0477_024.nt.4 | 41945.0 | 65.0 | 72.2 | 44.4 | 57.1 | 81.8 | 81.8 |
| DEX0477_024.nt.4 | 41945.1 | 65.0 | 76.5 | 44.4 | 66.7 | 81.8 | 81.8 |
| DEX0477_024.nt.4 | 41945.2 | 70.0 | 77.8 | 55.6 | 71.4 | 81.8 | 81.8 |
| DEX0477_024.nt.4 | 41945.3 | 70.0 | 77.8 | 55.6 | 71.4 | 81.8 | 81.8 |
| DEX0477_024.nt.4 | 41945.4 | 70.0 | 77.8 | 55.6 | 71.4 | 81.8 | 81.8 |
| DEX0477_024.nt.4 | 41946.0 | 65.0 | 76.5 | 44.4 | 57.1 | 81.8 | 90.0 |
| DEX0477_024.nt.4 | 41946.1 | 70.0 | 77.8 | 55.6 | 71.4 | 81.8 | 81.8 |
| DEX0477_024.nt.4 | 41946.2 | 70.0 | 77.8 | 55.6 | 71.4 | 81.8 | 81.8 |
| DEX0477_024.nt.4 | 41946.3 | 70.0 | 77.8 | 55.6 | 71.4 | 81.8 | 81.8 |
| DEX0477_024.nt.4 | 41946.4 | 70.0 | 77.8 | 55.6 | 71.4 | 81.8 | 81.8 |
| DEX0477_027.nt.1 | 2441.0 | 25.0 | 25.0 | 33.3 | 33.3 | 18.2 | 18.2 |
| DEX0477_027.nt.2 | 2441.0 | 25.0 | 25.0 | 33.3 | 33.3 | 18.2 | 18.2 |
| DEX0477_027.nt.3 | 2441.0 | 25.0 | 25.0 | 33.3 | 33.3 | 18.2 | 18.2 |
| DEX0477_027.nt.4 | 2441.0 | 25.0 | 25.0 | 33.3 | 33.3 | 18.2 | 18.2 |
| DEX0477_027.nt.5 | 2441.0 | 25.0 | 25.0 | 33.3 | 33.3 | 18.2 | 18.2 |
| DEX0477_027.nt.5 | 5236.0 | 25.0 | 25.0 | 22.2 | 22.2 | 27.3 | 27.3 |
| DEX0477_027.nt.6 | 2441.0 | 25.0 | 25.0 | 33.3 | 33.3 | 18.2 | 18.2 |
| DEX0477_027.nt.6 | 5236.0 | 25.0 | 25.0 | 22.2 | 22.2 | 27.3 | 27.3 |
| DEX0477_027.nt.7 | 2441.0 | 25.0 | 25.0 | 33.3 | 33.3 | 18.2 | 18.2 |
| DEX0477_027.nt.7 | 5236.0 | 25.0 | 25.0 | 22.2 | 22.2 | 27.3 | 27.3 |
| DEX0477_048.nt.1 | 33514.0 | 20.0 | 28.6 | 11.1 | 16.7 | 27.3 | 37.5 |
| DEX0477_048.nt.1 | 33514.1 | 20.0 | 30.8 | 11.1 | 20.0 | 27.3 | 37.5 |
| DEX0477_048.nt.2 | 33514.0 | 20.0 | 28.6 | 11.1 | 16.7 | 27.3 | 37.5 |
| DEX0477_048.nt.2 | 33514.1 | 20.0 | 30.8 | 11.1 | 20.0 | 27.3 | 37.5 |
| DEX0477_048.nt.3 | 33514.0 | 20.0 | 28.6 | 11.1 | 16.7 | 27.3 | 37.5 |
| DEX0477_048.nt.3 | 33514.1 | 20.0 | 30.8 | 11.1 | 20.0 | 27.3 | 37.5 |
| DEX0477_048.nt.3 | 33515.0 | 20.0 | 20.0 | 11.1 | 11.1 | 27.3 | 27.3 |
| DEX0477_048.nt.4 | 33514.0 | 20.0 | 28.6 | 11.1 | 16.7 | 27.3 | 37.5 |
| DEX0477_048.nt.4 | 33514.1 | 20.0 | 30.8 | 11.1 | 20.0 | 27.3 | 37.5 |
| DEX0477_048.nt.4 | 33515.0 | 20.0 | 20.0 | 11.1 | 11.1 | 27.3 | 27.3 |
| DEX0477_048.nt.4 | 33515.1 | 20.0 | 20.0 | 11.1 | 11.1 | 27.3 | 27.3 |
| DEX0477_052.nt.1 | 10766.0 | 10.0 | 66.7 | 11.1 | 100.0 | 9.1 | 50.0 |
| DEX0477_052.nt.1 | 10766.1 | 10.0 | 66.7 | 11.1 | 100.0 | 9.1 | 50.0 |
| DEX0477_052.nt.1 | 10767.0 | 10.0 | 22.2 | 11.1 | 33.3 | 9.1 | 16.7 |
| DEX0477_052.nt.1 | 10767.1 | 10.0 | 20.0 | 11.1 | 33.3 | 9.1 | 14.3 |
| DEX0477_061.nt.1 | 36403.0 | 30.0 | 30.0 | 33.3 | 33.3 | 27.3 | 27.3 |
| DEX0477_061.nt.1 | 36403.1 | 50.0 | 50.0 | 55.6 | 55.6 | 45.5 | 45.5 |
| DEX0477_061.nt.1 | 36404.0 | 75.0 | 75.0 | 55.6 | 55.6 | 90.9 | 90.9 |
| DEX0477_061.nt.1 | 36404.1 | 75.0 | 75.0 | 55.6 | 55.6 | 90.9 | 90.9 |
| DEX0477_061.nt.2 | 36403.0 | 30.0 | 30.0 | 33.3 | 33.3 | 27.3 | 27.3 |
| DEX0477_061.nt.2 | 36403.1 | 50.0 | 50.0 | 55.6 | 55.6 | 45.5 | 45.5 |
| DEX0477_061.nt.2 | 36404.0 | 75.0 | 75.0 | 55.6 | 55.6 | 90.9 | 90.9 |
| DEX0477_061.nt.2 | 36404.1 | 75.0 | 75.0 | 55.6 | 55.6 | 90.9 | 90.9 |
| DEX0477_065.nt.1 | 4941.0 | 55.0 | 55.0 | 33.3 | 33.3 | 72.7 | 72.7 |
| DEX0477_065.nt.2 | 4941.0 | 55.0 | 55.0 | 33.3 | 33.3 | 72.7 | 72.7 |
| DEX0477_065.nt.3 | 4941.0 | 55.0 | 55.0 | 33.3 | 33.3 | 72.7 | 72.7 |
| DEX0477_066.nt.1 | 4941.0 | 55.0 | 55.0 | 33.3 | 33.3 | 72.7 | 72.7 |
| DEX0477_066.nt.2 | 4941.0 | 55.0 | 55.0 | 33.3 | 33.3 | 72.7 | 72.7 |
| DEX0477_068.nt.1 | 5539.0 | 25.0 | 25.0 | 11.1 | 11.1 | 36.4 | 36.4 |
| DEX0477_070.nt.1 | 3745.0 | 45.0 | 45.0 | 33.3 | 33.3 | 54.5 | 54.5 |

[0576] TABLE 6

| | | | | | Mam | | |
|---|---|---|---|---|---|---|---|
| | | | Mam | | Multi- | Mam | Mam |
| | | Mam | Multi- | Mam | Can | Multi- | Multi- |
| | | Multi- | Can 550 | Multi- | 550 | Can 550 | Can 550 |
| | | Can 550 | ALL | Can 550 | ST1 | ST2, 3 | ST2, 3 % |
| | Oligo | ALL % up | % valid | ST1 % up | % valid | % up | valid |
| DEX ID | Name | n = 20 | up n = 20 | n = 9 | up n = 9 | n = 11 | up n = 11 |
| DEX0477_003.nt.1 | 96120.0 | 30.0 | 37.5 | 22.2 | 28.6 | 36.4 | 44.4 |
| DEX0477_003.nt.1 | 96120.1 | 30.0 | 31.6 | 22.2 | 25.0 | 36.4 | 36.4 |
| DEX0477_003.nt.1 | 105624.0 | 30.0 | 33.3 | 22.2 | 25.0 | 36.4 | 40.0 |
| DEX0477_003.nt.1 | 105624.1 | 40.0 | 40.0 | 33.3 | 33.3 | 45.5 | 45.5 |
| DEX0477_003.nt.1 | 105627.0 | 25.0 | 25.0 | 22.2 | 22.2 | 27.3 | 27.3 |
| DEX0477_003.nt.1 | 105627.1 | 25.0 | 25.0 | 22.2 | 22.2 | 27.3 | 27.3 |
| DEX0477_003.nt.1 | 105628.0 | 35.0 | 38.9 | 22.2 | 25.0 | 45.5 | 50.0 |
| DEX0477_003.nt.1 | 105628.1 | 30.0 | 37.5 | 22.2 | 28.6 | 36.4 | 44.4 |
| DEX0477_003.nt.2 | 96120.0 | 30.0 | 37.5 | 22.2 | 28.6 | 36.4 | 44.4 |
| DEX0477_003.nt.2 | 96120.1 | 30.0 | 31.6 | 22.2 | 25.0 | 36.4 | 36.4 |
| DEX0477_003.nt.2 | 105624.0 | 30.0 | 33.3 | 22.2 | 25.0 | 36.4 | 40.0 |
| DEX0477_003.nt.2 | 105624.1 | 40.0 | 40.0 | 33.3 | 33.3 | 45.5 | 45.5 |
| DEX0477_003.nt.2 | 105628.0 | 35.0 | 38.9 | 22.2 | 25.0 | 45.5 | 50.0 |
| DEX0477_003.nt.2 | 105628.1 | 30.0 | 37.5 | 22.2 | 28.6 | 36.4 | 44.4 |
| DEX0477_004.nt.1 | 1200.0 | 35.0 | 35.0 | 44.4 | 44.4 | 27.3 | 27.3 |
| DEX0477_004.nt.1 | 1201.0 | 35.0 | 35.0 | 44.4 | 44.4 | 27.3 | 27.3 |
| DEX0477_006.nt.1 | 9744.0 | 20.0 | 20.0 | 33.3 | 33.3 | 9.1 | 9.1 |
| DEX0477_006.nt.1 | 9744.1 | 15.0 | 15.0 | 33.3 | 33.3 | 0.0 | 0.0 |
| DEX0477_006.nt.1 | 9745.0 | 25.0 | 25.0 | 33.3 | 33.3 | 18.2 | 18.2 |
| DEX0477_006.nt.1 | 9745.1 | 25.0 | 25.0 | 33.3 | 33.3 | 18.2 | 18.2 |
| DEX0477_007.nt.1 | 17852.0 | 5.0 | 20.0 | 11.1 | 33.3 | 0.0 | 0.0 |
| DEX0477_007.nt.1 | 17852.1 | 5.0 | 20.0 | 11.1 | 33.3 | 0.0 | 0.0 |
| DEX0477_007.nt.1 | 17853.0 | 10.0 | 50.0 | 22.2 | 66.7 | 0.0 | 0.0 |
| DEX0477_007.nt.1 | 17853.1 | 10.0 | 66.7 | 22.2 | 66.7 | 0.0 | 0.0 |
| DEX0477_007.nt.1 | 18644.0 | 5.0 | 16.7 | 11.1 | 33.3 | 0.0 | 0.0 |
| DEX0477_007.nt.1 | 18644.1 | 5.0 | 20.0 | 11.1 | 33.3 | 0.0 | 0.0 |
| DEX0477_007.nt.1 | 18644.2 | 5.0 | 20.0 | 11.1 | 33.3 | 0.0 | 0.0 |
| DEX0477_007.nt.1 | 18644.3 | 5.0 | 14.3 | 11.1 | 33.3 | 0.0 | 0.0 |
| DEX0477_007.nt.1 | 18645.0 | 5.0 | 33.3 | 11.1 | 33.3 | 0.0 | 0.0 |
| DEX0477_007.nt.1 | 18645.1 | 10.0 | 66.7 | 22.2 | 66.7 | 0.0 | 0.0 |
| DEX0477_007.nt.1 | 18645.2 | 10.0 | 66.7 | 22.2 | 66.7 | 0.0 | 0.0 |
| DEX0477_007.nt.1 | 18645.3 | 10.0 | 50.0 | 22.2 | 66.7 | 0.0 | 0.0 |
| DEX0477_008.nt.1 | 4733.0 | 95.0 | 95.0 | 100.0 | 100.0 | 90.9 | 90.9 |
| DEX0477_008.nt.1 | 4733.1 | 95.0 | 95.0 | 100.0 | 100.0 | 90.9 | 90.9 |
| DEX0477_008.nt.1 | 4734.0 | 90.0 | 90.0 | 100.0 | 100.0 | 81.8 | 81.8 |
| DEX0477_008.nt.1 | 4734.1 | 95.0 | 95.0 | 100.0 | 100.0 | 90.9 | 90.9 |
| DEX0477_009.nt.1 | 990.0 | 45.0 | 45.0 | 44.4 | 44.4 | 45.5 | 45.5 |
| DEX0477_011.nt.1 | 102558.0 | 30.0 | 30.0 | 33.3 | 33.3 | 27.3 | 27.3 |
| DEX0477_011.nt.1 | 102558.1 | 25.0 | 25.0 | 33.3 | 33.3 | 18.2 | 18.2 |
| DEX0477_014.nt.1 | 4538.0 | 5.0 | 20.0 | 11.1 | 33.3 | 0.0 | 0.0 |
| DEX0477_014.nt.1 | 4538.1 | 5.0 | 25.0 | 11.1 | 50.0 | 0.0 | 0.0 |
| DEX0477_014.nt.1 | 27949.0 | 5.0 | 33.3 | 11.1 | 50.0 | 0.0 | 0.0 |
| DEX0477_014.nt.1 | 27949.1 | 5.0 | 25.0 | 11.1 | 50.0 | 0.0 | 0.0 |
| DEX0477_014.nt.2 | 4538.0 | 5.0 | 20.0 | 11.1 | 33.3 | 0.0 | 0.0 |
| DEX0477_014.nt.2 | 4538.1 | 5.0 | 25.0 | 11.1 | 50.0 | 0.0 | 0.0 |
| DEX0477_014.nt.2 | 27949.0 | 5.0 | 33.3 | 11.1 | 50.0 | 0.0 | 0.0 |
| DEX0477_014.nt.2 | 27949.1 | 5.0 | 25.0 | 11.1 | 50.0 | 0.0 | 0.0 |
| DEX0477_014.nt.3 | 4538.0 | 5.0 | 20.0 | 11.1 | 33.3 | 0.0 | 0.0 |
| DEX0477_014.nt.3 | 4538.1 | 5.0 | 25.0 | 11.1 | 50.0 | 0.0 | 0.0 |
| DEX0477_014.nt.3 | 27949.0 | 5.0 | 33.3 | 11.1 | 50.0 | 0.0 | 0.0 |
| DEX0477_014.nt.3 | 27949.1 | 5.0 | 25.0 | 11.1 | 50.0 | 0.0 | 0.0 |
| DEX0477_015.nt.1 | 2085.0 | 30.0 | 30.0 | 22.2 | 22.2 | 36.4 | 36.4 |
| DEX0477_015.nt.1 | 4909.0 | 30.0 | 30.0 | 22.2 | 22.2 | 36.4 | 36.4 |
| DEX0477_015.nt.1 | 4909.1 | 30.0 | 30.0 | 22.2 | 22.2 | 36.4 | 36.4 |
| DEX0477_015.nt.1 | 4910.0 | 30.0 | 30.0 | 22.2 | 22.2 | 36.4 | 36.4 |
| DEX0477_015.nt.1 | 4910.1 | 30.0 | 30.0 | 22.2 | 22.2 | 36.4 | 36.4 |
| DEX0477_015.nt.1 | 17292.0 | 30.0 | 30.0 | 22.2 | 22.2 | 36.4 | 36.4 |
| DEX0477_015.nt.1 | 17292.1 | 30.0 | 30.0 | 22.2 | 22.2 | 36.4 | 36.4 |
| DEX0477_015.nt.1 | 17293.0 | 30.0 | 30.0 | 22.2 | 22.2 | 36.4 | 36.4 |
| DEX0477_015.nt.1 | 17293.1 | 30.0 | 30.0 | 22.2 | 22.2 | 36.4 | 36.4 |
| DEX0477_015.nt.1 | 24404.0 | 30.0 | 30.0 | 22.2 | 22.2 | 36.4 | 36.4 |
| DEX0477_015.nt.1 | 24404.1 | 30.0 | 30.0 | 22.2 | 22.2 | 36.4 | 36.4 |
| DEX0477_015.nt.1 | 24405.0 | 30.0 | 30.0 | 22.2 | 22.2 | 36.4 | 36.4 |
| DEX0477_015.nt.1 | 24405.1 | 30.0 | 30.0 | 22.2 | 22.2 | 36.4 | 36.4 |
| DEX0477_015.nt.2 | 2085.0 | 30.0 | 30.0 | 22.2 | 22.2 | 36.4 | 36.4 |
| DEX0477_015.nt.2 | 4909.0 | 30.0 | 30.0 | 22.2 | 22.2 | 36.4 | 36.4 |
| DEX0477_015.nt.2 | 4909.1 | 30.0 | 30.0 | 22.2 | 22.2 | 36.4 | 36.4 |
| DEX0477_015.nt.2 | 4910.0 | 30.0 | 30.0 | 22.2 | 22.2 | 36.4 | 36.4 |
| DEX0477_015.nt.2 | 4910.1 | 30.0 | 30.0 | 22.2 | 22.2 | 36.4 | 36.4 |
| DEX0477_015.nt.2 | 17292.0 | 30.0 | 30.0 | 22.2 | 22.2 | 36.4 | 36.4 |
| DEX0477_015.nt.2 | 17292.1 | 30.0 | 30.0 | 22.2 | 22.2 | 36.4 | 36.4 |
| DEX0477_015.nt.2 | 17293.0 | 30.0 | 30.0 | 22.2 | 22.2 | 36.4 | 36.4 |
| DEX0477_015.nt.2 | 17293.1 | 30.0 | 30.0 | 22.2 | 22.2 | 36.4 | 36.4 |
| DEX0477_015.nt.2 | 24404.0 | 30.0 | 30.0 | 22.2 | 22.2 | 36.4 | 36.4 |
| DEX0477_015.nt.2 | 24404.1 | 30.0 | 30.0 | 22.2 | 22.2 | 36.4 | 36.4 |
| DEX0477_015.nt.2 | 24405.0 | 30.0 | 30.0 | 22.2 | 22.2 | 36.4 | 36.4 |
| DEX0477_015.nt.2 | 24405.1 | 30.0 | 30.0 | 22.2 | 22.2 | 36.4 | 36.4 |
| DEX0477_016.nt.1 | 33428.0 | 25.0 | 25.0 | 11.1 | 11.1 | 36.4 | 36.4 |
| DEX0477_016.nt.1 | 33428.1 | 25.0 | 25.0 | 11.1 | 11.1 | 36.4 | 36.4 |
| DEX0477_016.nt.1 | 33429.0 | 25.0 | 26.3 | 11.1 | 11.1 | 36.4 | 40.0 |
| DEX0477_016.nt.1 | 33429.1 | 25.0 | 25.0 | 11.1 | 11.1 | 36.4 | 36.4 |
| DEX0477_016.nt.1 | 37143.0 | 25.0 | 25.0 | 11.1 | 11.1 | 36.4 | 36.4 |
| DEX0477_016.nt.1 | 37143.1 | 25.0 | 25.0 | 11.1 | 11.1 | 36.4 | 36.4 |
| DEX0477_016.nt.1 | 37143.2 | 25.0 | 25.0 | 11.1 | 11.1 | 36.4 | 36.4 |
| DEX0477_016.nt.1 | 37143.3 | 25.0 | 25.0 | 11.1 | 11.1 | 36.4 | 36.4 |
| DEX0477_016.nt.1 | 37143.4 | 25.0 | 25.0 | 11.1 | 11.1 | 36.4 | 36.4 |
| DEX0477_016.nt.1 | 39533.0 | 25.0 | 25.0 | 11.1 | 11.1 | 36.4 | 36.4 |
| DEX0477_016.nt.1 | 39533.1 | 25.0 | 25.0 | 11.1 | 11.1 | 36.4 | 36.4 |
| DEX0477_016.nt.1 | 39534.0 | 25.0 | 25.0 | 11.1 | 11.1 | 36.4 | 36.4 |
| DEX0477_016.nt.1 | 39534.1 | 25.0 | 25.0 | 11.1 | 11.1 | 36.4 | 36.4 |
| DEX0477_016.nt.2 | 33428.0 | 25.0 | 25.0 | 11.1 | 11.1 | 36.4 | 36.4 |
| DEX0477_016.nt.2 | 33428.1 | 25.0 | 25.0 | 11.1 | 11.1 | 36.4 | 36.4 |
| DEX0477_016.nt.2 | 33429.0 | 25.0 | 26.3 | 11.1 | 11.1 | 36.4 | 40.0 |
| DEX0477_016.nt.2 | 33429.1 | 25.0 | 25.0 | 11.1 | 11.1 | 36.4 | 36.4 |
| DEX0477_016.nt.2 | 37143.0 | 25.0 | 25.0 | 11.1 | 11.1 | 36.4 | 36.4 |
| DEX0477_016.nt.2 | 37143.1 | 25.0 | 25.0 | 11.1 | 11.1 | 36.4 | 36.4 |
| DEX0477_016.nt.2 | 37143.2 | 25.0 | 25.0 | 11.1 | 11.1 | 36.4 | 36.4 |
| DEX0477_016.nt.2 | 37143.3 | 25.0 | 25.0 | 11.1 | 11.1 | 36.4 | 36.4 |
| DEX0477_016.nt.2 | 37143.4 | 25.0 | 25.0 | 11.1 | 11.1 | 36.4 | 36.4 |
| DEX0477_016.nt.2 | 39533.0 | 25.0 | 25.0 | 11.1 | 11.1 | 36.4 | 36.4 |
| DEX0477_016.nt.2 | 39533.1 | 25.0 | 25.0 | 11.1 | 11.1 | 36.4 | 36.4 |
| DEX0477_016.nt.2 | 39534.0 | 25.0 | 25.0 | 11.1 | 11.1 | 36.4 | 36.4 |
| DEX0477_016.nt.2 | 39534.1 | 25.0 | 25.0 | 11.1 | 11.1 | 36.4 | 36.4 |
| DEX0477_016.nt.4 | 33428.0 | 25.0 | 25.0 | 11.1 | 11.1 | 36.4 | 36.4 |
| DEX0477_016.nt.4 | 33428.1 | 25.0 | 25.0 | 11.1 | 11.1 | 36.4 | 36.4 |
| DEX0477_016.nt.4 | 33429.0 | 25.0 | 26.3 | 11.1 | 11.1 | 36.4 | 40.0 |
| DEX0477_016.nt.4 | 33429.1 | 25.0 | 25.0 | 11.1 | 11.1 | 36.4 | 36.4 |
| DEX0477_016.nt.4 | 37143.0 | 25.0 | 25.0 | 11.1 | 11.1 | 36.4 | 36.4 |
| DEX0477_016.nt.4 | 37143.1 | 25.0 | 25.0 | 11.1 | 11.1 | 36.4 | 36.4 |
| DEX0477_016.nt.4 | 37143.2 | 25.0 | 25.0 | 11.1 | 11.1 | 36.4 | 36.4 |
| DEX0477_016.nt.4 | 37143.3 | 25.0 | 25.0 | 11.1 | 11.1 | 36.4 | 36.4 |
| DEX0477_016.nt.4 | 37143.4 | 25.0 | 25.0 | 11.1 | 11.1 | 36.4 | 36.4 |
| DEX0477_016.nt.4 | 39533.0 | 25.0 | 25.0 | 11.1 | 11.1 | 36.4 | 36.4 |
| DEX0477_016.nt.4 | 39533.1 | 25.0 | 25.0 | 11.1 | 11.1 | 36.4 | 36.4 |
| DEX0477_016.nt.4 | 39534.0 | 25.0 | 25.0 | 11.1 | 11.1 | 36.4 | 36.4 |
| DEX0477_016.nt.4 | 39534.1 | 25.0 | 25.0 | 11.1 | 11.1 | 36.4 | 36.4 |
| DEX0477_016.nt.5 | 33428.0 | 25.0 | 25.0 | 11.1 | 11.1 | 36.4 | 36.4 |
| DEX0477_016.nt.5 | 33428.1 | 25.0 | 25.0 | 11.1 | 11.1 | 36.4 | 36.4 |
| DEX0477_016.nt.5 | 33429.0 | 25.0 | 26.3 | 11.1 | 11.1 | 36.4 | 40.0 |
| DEX0477_016.nt.5 | 33429.1 | 25.0 | 25.0 | 11.1 | 11.1 | 36.4 | 36.4 |
| DEX0477_016.nt.5 | 37143.0 | 25.0 | 25.0 | 11.1 | 11.1 | 36.4 | 36.4 |
| DEX0477_016.nt.5 | 37143.1 | 25.0 | 25.0 | 11.1 | 11.1 | 36.4 | 36.4 |
| DEX0477_016.nt.5 | 37143.2 | 25.0 | 25.0 | 11.1 | 11.1 | 36.4 | 36.4 |
| DEX0477_016.nt.5 | 37143.3 | 25.0 | 25.0 | 11.1 | 11.1 | 36.4 | 36.4 |
| DEX0477_016.nt.5 | 37143.4 | 25.0 | 25.0 | 11.1 | 11.1 | 36.4 | 36.4 |
| DEX0477_016.nt.5 | 39533.0 | 25.0 | 25.0 | 11.1 | 11.1 | 36.4 | 36.4 |
| DEX0477_016.nt.5 | 39533.1 | 25.0 | 25.0 | 11.1 | 11.1 | 36.4 | 36.4 |
| DEX0477_016.nt.5 | 39534.0 | 25.0 | 25.0 | 11.1 | 11.1 | 36.4 | 36.4 |
| DEX0477_016.nt.5 | 39534.1 | 25.0 | 25.0 | 11.1 | 11.1 | 36.4 | 36.4 |
| DEX0477_018.nt.1 | 102557.0 | 25.0 | 25.0 | 33.3 | 33.3 | 18.2 | 18.2 |
| DEX0477_018.nt.1 | 102557.1 | 25.0 | 25.0 | 33.3 | 33.3 | 18.2 | 18.2 |
| DEX0477_018.nt.1 | 102558.0 | 30.0 | 30.0 | 33.3 | 33.3 | 27.3 | 27.3 |
| DEX0477_018.nt.1 | 102558.1 | 25.0 | 25.0 | 33.3 | 33.3 | 18.2 | 18.2 |
| DEX0477_019.nt.1 | 41937.0 | 20.0 | 66.7 | 22.2 | 66.7 | 18.2 | 66.7 |
| DEX0477_019.nt.1 | 41937.1 | 15.0 | 75.0 | 22.2 | 100.0 | 9.1 | 50.0 |
| DEX0477_019.nt.1 | 41937.2 | 15.0 | 50.0 | 22.2 | 66.7 | 9.1 | 33.3 |
| DEX0477_019.nt.1 | 41938.0 | 20.0 | 36.4 | 11.1 | 25.0 | 27.3 | 42.9 |
| DEX0477_019.nt.1 | 41938.1 | 20.0 | 40.0 | 22.2 | 50.0 | 18.2 | 33.3 |
| DEX0477_019.nt.1 | 41938.2 | 20.0 | 50.0 | 22.2 | 50.0 | 18.2 | 50.0 |
| DEX0477_019.nt.1 | 41939.0 | 30.0 | 42.9 | 22.2 | 33.3 | 36.4 | 50.0 |
| DEX0477_019.nt.1 | 41939.1 | 25.0 | 55.6 | 22.2 | 40.0 | 27.3 | 75.0 |
| DEX0477_019.nt.1 | 41939.2 | 30.0 | 46.2 | 22.2 | 40.0 | 36.4 | 50.0 |
| DEX0477_019.nt.1 | 41940.0 | 30.0 | 42.9 | 22.2 | 33.3 | 36.4 | 50.0 |
| DEX0477_019.nt.1 | 41940.1 | 25.0 | 35.7 | 22.2 | 33.3 | 27.3 | 37.5 |
| DEX0477_019.nt.1 | 41940.2 | 30.0 | 50.0 | 22.2 | 50.0 | 36.4 | 50.0 |
| DEX0477_019.nt.1 | 78627.0 | 20.0 | 80.0 | 22.2 | 100.0 | 18.2 | 66.7 |
| DEX0477_019.nt.1 | 78627.1 | 10.0 | 100.0 | 22.2 | 100.0 | 0.0 | 0.0 |
| DEX0477_019.nt.1 | 78628.0 | 15.0 | 75.0 | 22.2 | 100.0 | 9.1 | 50.0 |
| DEX0477_019.nt.1 | 78628.1 | 10.0 | 100.0 | 22.2 | 100.0 | 0.0 | 0.0 |
| DEX0477_019.nt.1 | 94127.0 | 10.0 | 50.0 | 11.1 | 100.0 | 9.1 | 33.3 |
| DEX0477_019.nt.1 | 94127.1 | 25.0 | 71.4 | 22.2 | 100.0 | 27.3 | 60.0 |
| DEX0477_019.nt.1 | 94128.0 | 25.0 | 55.6 | 22.2 | 50.0 | 27.3 | 60.0 |
| DEX0477_019.nt.1 | 94128.1 | 25.0 | 62.5 | 22.2 | 50.0 | 27.3 | 75.0 |
| DEX0477_019.nt.1 | 102785.0 | 25.0 | 83.3 | 22.2 | 100.0 | 27.3 | 75.0 |
| DEX0477_019.nt.1 | 102785.1 | 10.0 | 66.7 | 11.1 | 100.0 | 9.1 | 50.0 |
| DEX0477_019.nt.1 | 102786.0 | 25.0 | 71.4 | 22.2 | 50.0 | 27.3 | 100.0 |
| DEX0477_019.nt.1 | 102786.1 | 35.0 | 70.0 | 22.2 | 50.0 | 45.5 | 83.3 |
| DEX0477_019.nt.1 | 102787.0 | 35.0 | 58.3 | 22.2 | 40.0 | 45.5 | 71.4 |
| DEX0477_019.nt.1 | 102787.1 | 40.0 | 66.7 | 22.2 | 50.0 | 54.5 | 75.0 |
| DEX0477_019.nt.1 | 102789.0 | 20.0 | 57.1 | 22.2 | 50.0 | 18.2 | 66.7 |
| DEX0477_019.nt.1 | 102789.1 | 25.0 | 71.4 | 22.2 | 50.0 | 27.3 | 100.0 |
| DEX0477_020.nt.1 | 41937.0 | 20.0 | 66.7 | 22.2 | 66.7 | 18.2 | 66.7 |
| DEX0477_020.nt.1 | 41937.1 | 15.0 | 75.0 | 22.2 | 100.0 | 9.1 | 50.0 |
| DEX0477_020.nt.1 | 41937.2 | 15.0 | 50.0 | 22.2 | 66.7 | 9.1 | 33.3 |
| DEX0477_020.nt.1 | 41938.0 | 20.0 | 36.4 | 11.1 | 25.0 | 27.3 | 42.9 |
| DEX0477_020.nt.1 | 41938.1 | 20.0 | 40.0 | 22.2 | 50.0 | 18.2 | 33.3 |
| DEX0477_020.nt.1 | 41938.2 | 20.0 | 50.0 | 22.2 | 50.0 | 18.2 | 50.0 |
| DEX0477_020.nt.1 | 41939.0 | 30.0 | 42.9 | 22.2 | 33.3 | 36.4 | 50.0 |
| DEX0477_020.nt.1 | 41939.1 | 25.0 | 55.6 | 22.2 | 40.0 | 27.3 | 75.0 |
| DEX0477_020.nt.1 | 41939.2 | 30.0 | 46.2 | 22.2 | 40.0 | 36.4 | 50.0 |
| DEX0477_020.nt.1 | 41940.0 | 30.0 | 42.9 | 22.2 | 33.3 | 36.4 | 50.0 |
| DEX0477_020.nt.1 | 41940.1 | 25.0 | 35.7 | 22.2 | 33.3 | 27.3 | 37.5 |
| DEX0477_020.nt.1 | 41940.2 | 30.0 | 50.0 | 22.2 | 50.0 | 36.4 | 50.0 |
| DEX0477_020.nt.1 | 78627.0 | 20.0 | 80.0 | 22.2 | 100.0 | 18.2 | 66.7 |
| DEX0477_020.nt.1 | 78627.1 | 10.0 | 100.0 | 22.2 | 100.0 | 0.0 | 0.0 |
| DEX0477_020.nt.1 | 78628.0 | 15.0 | 75.0 | 22.2 | 100.0 | 9.1 | 50.0 |
| DEX0477_020.nt.1 | 78628.1 | 10.0 | 100.0 | 22.2 | 100.0 | 0.0 | 0.0 |
| DEX0477_020.nt.1 | 94128.0 | 25.0 | 55.6 | 22.2 | 50.0 | 27.3 | 60.0 |
| DEX0477_020.nt.1 | 94128.1 | 25.0 | 62.5 | 22.2 | 50.0 | 27.3 | 75.0 |
| DEX0477_020.nt.1 | 102786.0 | 25.0 | 71.4 | 22.2 | 50.0 | 27.3 | 100.0 |
| DEX0477_020.nt.1 | 102786.1 | 35.0 | 70.0 | 22.2 | 50.0 | 45.5 | 83.3 |
| DEX0477_020.nt.1 | 102787.0 | 35.0 | 58.3 | 22.2 | 40.0 | 45.5 | 71.4 |
| DEX0477_020.nt.1 | 102787.1 | 40.0 | 66.7 | 22.2 | 50.0 | 54.5 | 75.0 |
| DEX0477_020.nt.1 | 102789.0 | 20.0 | 57.1 | 22.2 | 50.0 | 18.2 | 66.7 |
| DEX0477_020.nt.1 | 102789.1 | 25.0 | 71.4 | 22.2 | 50.0 | 27.3 | 100.0 |
| DEX0477_020.nt.2 | 41937.0 | 20.0 | 66.7 | 22.2 | 66.7 | 18.2 | 66.7 |
| DEX0477_020.nt.2 | 41937.1 | 15.0 | 75.0 | 22.2 | 100.0 | 9.1 | 50.0 |
| DEX0477_020.nt.2 | 41937.2 | 15.0 | 50.0 | 22.2 | 66.7 | 9.1 | 33.3 |
| DEX0477_020.nt.2 | 41938.0 | 20.0 | 36.4 | 11.1 | 25.0 | 27.3 | 42.9 |
| DEX0477_020.nt.2 | 41938.1 | 20.0 | 40.0 | 22.2 | 50.0 | 18.2 | 33.3 |
| DEX0477_020.nt.2 | 41938.2 | 20.0 | 50.0 | 22.2 | 50.0 | 18.2 | 50.0 |
| DEX0477_020.nt.2 | 41939.0 | 30.0 | 42.9 | 22.2 | 33.3 | 36.4 | 50.0 |
| DEX0477_020.nt.2 | 41939.1 | 25.0 | 55.6 | 22.2 | 40.0 | 27.3 | 75.0 |
| DEX0477_020.nt.2 | 41939.2 | 30.0 | 46.2 | 22.2 | 40.0 | 36.4 | 50.0 |
| DEX0477_020.nt.2 | 41940.0 | 30.0 | 42.9 | 22.2 | 33.3 | 36.4 | 50.0 |
| DEX0477_020.nt.2 | 41940.1 | 25.0 | 35.7 | 22.2 | 33.3 | 27.3 | 37.5 |
| DEX0477_020.nt.2 | 41940.2 | 30.0 | 50.0 | 22.2 | 50.0 | 36.4 | 50.0 |
| DEX0477_020.nt.2 | 78627.0 | 20.0 | 80.0 | 22.2 | 100.0 | 18.2 | 66.7 |
| DEX0477_020.nt.2 | 78627.1 | 10.0 | 100.0 | 22.2 | 100.0 | 0.0 | 0.0 |
| DEX0477_020.nt.2 | 78628.0 | 15.0 | 75.0 | 22.2 | 100.0 | 9.1 | 50.0 |
| DEX0477_020.nt.2 | 78628.1 | 10.0 | 100.0 | 22.2 | 100.0 | 0.0 | 0.0 |
| DEX0477_020.nt.2 | 94128.0 | 25.0 | 55.6 | 22.2 | 50.0 | 27.3 | 60.0 |
| DEX0477_020.nt.2 | 94128.1 | 25.0 | 62.5 | 22.2 | 50.0 | 27.3 | 75.0 |
| DEX0477_020.nt.2 | 102786.0 | 25.0 | 71.4 | 22.2 | 50.0 | 27.3 | 100.0 |
| DEX0477_020.nt.2 | 102786.1 | 35.0 | 70.0 | 22.2 | 50.0 | 45.5 | 83.3 |
| DEX0477_020.nt.2 | 102787.0 | 35.0 | 58.3 | 22.2 | 40.0 | 45.5 | 71.4 |
| DEX0477_020.nt.2 | 102787.1 | 40.0 | 66.7 | 22.2 | 50.0 | 54.5 | 75.0 |
| DEX0477_020.nt.2 | 102789.0 | 20.0 | 57.1 | 22.2 | 50.0 | 18.2 | 66.7 |
| DEX0477_020.nt.2 | 102789.1 | 25.0 | 71.4 | 22.2 | 50.0 | 27.3 | 100.0 |
| DEX0477_021.nt.1 | 26770.0 | 70.0 | 73.7 | 55.6 | 62.5 | 81.8 | 81.8 |
| DEX0477_021.nt.1 | 26770.1 | 70.0 | 77.8 | 55.6 | 71.4 | 81.8 | 81.8 |
| DEX0477_021.nt.1 | 26771.0 | 70.0 | 77.8 | 55.6 | 71.4 | 81.8 | 81.8 |
| DEX0477_021.nt.1 | 26771.1 | 70.0 | 77.8 | 55.6 | 71.4 | 81.8 | 81.8 |
| DEX0477_021.nt.1 | 33088.0 | 70.0 | 73.7 | 55.6 | 62.5 | 81.8 | 81.8 |
| DEX0477_021.nt.1 | 33088.1 | 70.0 | 77.8 | 55.6 | 71.4 | 81.8 | 81.8 |
| DEX0477_021.nt.1 | 33088.2 | 70.0 | 77.8 | 55.6 | 71.4 | 81.8 | 81.8 |
| DEX0477_021.nt.1 | 33088.3 | 70.0 | 77.8 | 55.6 | 71.4 | 81.8 | 81.8 |
| DEX0477_021.nt.1 | 33089.0 | 70.0 | 77.8 | 55.6 | 71.4 | 81.8 | 81.8 |
| DEX0477_021.nt.1 | 33089.1 | 70.0 | 77.8 | 55.6 | 71.4 | 81.8 | 81.8 |
| DEX0477_021.nt.1 | 33089.2 | 55.0 | 73.3 | 33.3 | 60.0 | 72.7 | 80.0 |
| DEX0477_021.nt.1 | 33089.3 | 70.0 | 77.8 | 55.6 | 71.4 | 81.8 | 81.8 |
| DEX0477_021.nt.1 | 41945.0 | 65.0 | 76.5 | 44.4 | 57.1 | 81.8 | 90.0 |
| DEX0477_021.nt.1 | 41945.1 | 70.0 | 82.4 | 55.6 | 71.4 | 81.8 | 90.0 |
| DEX0477_021.nt.1 | 41945.2 | 70.0 | 82.4 | 55.6 | 71.4 | 81.8 | 90.0 |
| DEX0477_021.nt.1 | 41945.3 | 70.0 | 82.4 | 55.6 | 71.4 | 81.8 | 90.0 |
| DEX0477_021.nt.1 | 41945.4 | 70.0 | 82.4 | 55.6 | 71.4 | 81.8 | 90.0 |
| DEX0477_021.nt.1 | 41946.0 | 65.0 | 81.2 | 44.4 | 57.1 | 81.8 | 100.0 |
| DEX0477_021.nt.1 | 41946.1 | 70.0 | 82.4 | 55.6 | 71.4 | 81.8 | 90.0 |
| DEX0477_021.nt.1 | 41946.2 | 70.0 | 82.4 | 55.6 | 71.4 | 81.8 | 90.0 |
| DEX0477_021.nt.1 | 41946.3 | 70.0 | 77.8 | 55.6 | 71.4 | 81.8 | 81.8 |
| DEX0477_021.nt.1 | 41946.4 | 70.0 | 77.8 | 55.6 | 71.4 | 81.8 | 81.8 |
| DEX0477_021.nt.2 | 26770.0 | 70.0 | 73.7 | 55.6 | 62.5 | 81.8 | 81.8 |
| DEX0477_021.nt.2 | 26770.1 | 70.0 | 77.8 | 55.6 | 71.4 | 81.8 | 81.8 |
| DEX0477_021.nt.2 | 26771.0 | 70.0 | 77.8 | 55.6 | 71.4 | 81.8 | 81.8 |
| DEX0477_021.nt.2 | 26771.1 | 70.0 | 77.8 | 55.6 | 71.4 | 81.8 | 81.8 |
| DEX0477_021.nt.2 | 33088.0 | 70.0 | 73.7 | 55.6 | 62.5 | 81.8 | 81.8 |
| DEX0477_021.nt.2 | 33088.1 | 70.0 | 77.8 | 55.6 | 71.4 | 81.8 | 81.8 |
| DEX0477_021.nt.2 | 33088.2 | 70.0 | 77.8 | 55.6 | 71.4 | 81.8 | 81.8 |
| DEX0477_021.nt.2 | 33088.3 | 70.0 | 77.8 | 55.6 | 71.4 | 81.8 | 81.8 |
| DEX0477_021.nt.2 | 33089.0 | 70.0 | 77.8 | 55.6 | 71.4 | 81.8 | 81.8 |
| DEX0477_021.nt.2 | 33089.1 | 70.0 | 77.8 | 55.6 | 71.4 | 81.8 | 81.8 |
| DEX0477_021.nt.2 | 33089.2 | 55.0 | 73.3 | 33.3 | 60.0 | 72.7 | 80.0 |
| DEX0477_021.nt.2 | 33089.3 | 70.0 | 77.8 | 55.6 | 71.4 | 81.8 | 81.8 |
| DEX0477_021.nt.2 | 41945.0 | 65.0 | 76.5 | 44.4 | 57.1 | 81.8 | 90.0 |
| DEX0477_021.nt.2 | 41945.1 | 70.0 | 82.4 | 55.6 | 71.4 | 81.8 | 90.0 |
| DEX0477_021.nt.2 | 41945.2 | 70.0 | 82.4 | 55.6 | 71.4 | 81.8 | 90.0 |
| DEX0477_021.nt.2 | 41945.3 | 70.0 | 82.4 | 55.6 | 71.4 | 81.8 | 90.0 |
| DEX0477_021.nt.2 | 41945.4 | 70.0 | 82.4 | 55.6 | 71.4 | 81.8 | 90.0 |
| DEX0477_021.nt.2 | 41946.0 | 65.0 | 81.2 | 44.4 | 57.1 | 81.8 | 100.0 |
| DEX0477_021.nt.2 | 41946.1 | 70.0 | 82.4 | 55.6 | 71.4 | 81.8 | 90.0 |
| DEX0477_021.nt.2 | 41946.2 | 70.0 | 82.4 | 55.6 | 71.4 | 81.8 | 90.0 |
| DEX0477_021.nt.2 | 41946.3 | 70.0 | 77.8 | 55.6 | 71.4 | 81.8 | 81.8 |
| DEX0477_021.nt.2 | 41946.4 | 70.0 | 77.8 | 55.6 | 71.4 | 81.8 | 81.8 |
| DEX0477_022.nt.1 | 41937.0 | 20.0 | 66.7 | 22.2 | 66.7 | 18.2 | 66.7 |
| DEX0477_022.nt.1 | 41937.1 | 15.0 | 75.0 | 22.2 | 100.0 | 9.1 | 50.0 |
| DEX0477_022.nt.1 | 41937.2 | 15.0 | 50.0 | 22.2 | 66.7 | 9.1 | 33.3 |
| DEX0477_022.nt.1 | 41939.0 | 30.0 | 42.9 | 22.2 | 33.3 | 36.4 | 50.0 |
| DEX0477_022.nt.1 | 41939.1 | 25.0 | 55.6 | 22.2 | 40.0 | 27.3 | 75.0 |
| DEX0477_022.nt.1 | 41939.2 | 30.0 | 46.2 | 22.2 | 40.0 | 36.4 | 50.0 |
| DEX0477_022.nt.1 | 41940.0 | 30.0 | 42.9 | 22.2 | 33.3 | 36.4 | 50.0 |
| DEX0477_022.nt.1 | 41940.1 | 25.0 | 35.7 | 22.2 | 33.3 | 27.3 | 37.5 |
| DEX0477_022.nt.1 | 41940.2 | 30.0 | 50.0 | 22.2 | 50.0 | 36.4 | 50.0 |
| DEX0477_022.nt.1 | 78627.0 | 20.0 | 80.0 | 22.2 | 100.0 | 18.2 | 66.7 |
| DEX0477_022.nt.1 | 78627.1 | 10.0 | 100.0 | 22.2 | 100.0 | 0.0 | 0.0 |
| DEX0477_022.nt.1 | 78628.0 | 15.0 | 75.0 | 22.2 | 100.0 | 9.1 | 50.0 |
| DEX0477_022.nt.1 | 78628.1 | 10.0 | 100.0 | 22.2 | 100.0 | 0.0 | 0.0 |
| DEX0477_023.nt.1 | 33088.0 | 70.0 | 73.7 | 55.6 | 62.5 | 81.8 | 81.8 |
| DEX0477_023.nt.1 | 33088.1 | 70.0 | 77.8 | 55.6 | 71.4 | 81.8 | 81.8 |
| DEX0477_023.nt.1 | 33088.2 | 70.0 | 77.8 | 55.6 | 71.4 | 81.8 | 81.8 |
| DEX0477_023.nt.1 | 33088.3 | 70.0 | 77.8 | 55.6 | 71.4 | 81.8 | 81.8 |
| DEX0477_024.nt.1 | 26770.0 | 70.0 | 73.7 | 55.6 | 62.5 | 81.8 | 81.8 |
| DEX0477_024.nt.1 | 26770.1 | 70.0 | 77.8 | 55.6 | 71.4 | 81.8 | 81.8 |
| DEX0477_024.nt.1 | 26771.0 | 70.0 | 77.8 | 55.6 | 71.4 | 81.8 | 81.8 |
| DEX0477_024.nt.1 | 26771.1 | 70.0 | 77.8 | 55.6 | 71.4 | 81.8 | 81.8 |
| DEX0477_024.nt.1 | 41945.0 | 65.0 | 76.5 | 44.4 | 57.1 | 81.8 | 90.0 |
| DEX0477_024.nt.1 | 41945.1 | 70.0 | 82.4 | 55.6 | 71.4 | 81.8 | 90.0 |
| DEX0477_024.nt.1 | 41945.2 | 70.0 | 82.4 | 55.6 | 71.4 | 81.8 | 90.0 |
| DEX0477_024.nt.1 | 41945.3 | 70.0 | 82.4 | 55.6 | 71.4 | 81.8 | 90.0 |
| DEX0477_024.nt.1 | 41945.4 | 70.0 | 82.4 | 55.6 | 71.4 | 81.8 | 90.0 |
| DEX0477_024.nt.1 | 41946.0 | 65.0 | 81.2 | 44.4 | 57.1 | 81.8 | 100.0 |
| DEX0477_024.nt.1 | 41946.1 | 70.0 | 82.4 | 55.6 | 71.4 | 81.8 | 90.0 |
| DEX0477_024.nt.1 | 41946.2 | 70.0 | 82.4 | 55.6 | 71.4 | 81.8 | 90.0 |
| DEX0477_024.nt.1 | 41946.3 | 70.0 | 77.8 | 55.6 | 71.4 | 81.8 | 81.8 |
| DEX0477_024.nt.1 | 41946.4 | 70.0 | 77.8 | 55.6 | 71.4 | 81.8 | 81.8 |
| DEX0477_024.nt.2 | 26770.0 | 70.0 | 73.7 | 55.6 | 62.5 | 81.8 | 81.8 |
| DEX0477_024.nt.2 | 26770.1 | 70.0 | 77.8 | 55.6 | 71.4 | 81.8 | 81.8 |
| DEX0477_024.nt.2 | 26771.0 | 70.0 | 77.8 | 55.6 | 71.4 | 81.8 | 81.8 |
| DEX0477_024.nt.2 | 26771.1 | 70.0 | 77.8 | 55.6 | 71.4 | 81.8 | 81.8 |
| DEX0477_024.nt.2 | 41945.0 | 65.0 | 76.5 | 44.4 | 57.1 | 81.8 | 90.0 |
| DEX0477_024.nt.2 | 41945.1 | 70.0 | 82.4 | 55.6 | 71.4 | 81.8 | 90.0 |
| DEX0477_024.nt.2 | 41945.2 | 70.0 | 82.4 | 55.6 | 71.4 | 81.8 | 90.0 |
| DEX0477_024.nt.2 | 41945.3 | 70.0 | 82.4 | 55.6 | 71.4 | 81.8 | 90.0 |
| DEX0477_024.nt.2 | 41945.4 | 70.0 | 82.4 | 55.6 | 71.4 | 81.8 | 90.0 |
| DEX0477_024.nt.2 | 41946.0 | 65.0 | 81.2 | 44.4 | 57.1 | 81.8 | 100.0 |
| DEX0477_024.nt.2 | 41946.1 | 70.0 | 82.4 | 55.6 | 71.4 | 81.8 | 90.0 |
| DEX0477_024.nt.2 | 41946.2 | 70.0 | 82.4 | 55.6 | 71.4 | 81.8 | 90.0 |
| DEX0477_024.nt.2 | 41946.3 | 70.0 | 77.8 | 55.6 | 71.4 | 81.8 | 81.8 |
| DEX0477_024.nt.2 | 41946.4 | 70.0 | 77.8 | 55.6 | 71.4 | 81.8 | 81.8 |
| DEX0477_024.nt.3 | 26770.0 | 70.0 | 73.7 | 55.6 | 62.5 | 81.8 | 81.8 |
| DEX0477_024.nt.3 | 26770.1 | 70.0 | 77.8 | 55.6 | 71.4 | 81.8 | 81.8 |
| DEX0477_024.nt.3 | 26771.0 | 70.0 | 77.8 | 55.6 | 71.4 | 81.8 | 81.8 |
| DEX0477_024.nt.3 | 26771.1 | 70.0 | 77.8 | 55.6 | 71.4 | 81.8 | 81.8 |
| DEX0477_024.nt.3 | 41945.0 | 65.0 | 76.5 | 44.4 | 57.1 | 81.8 | 90.0 |
| DEX0477_024.nt.3 | 41945.1 | 70.0 | 82.4 | 55.6 | 71.4 | 81.8 | 90.0 |
| DEX0477_024.nt.3 | 41945.2 | 70.0 | 82.4 | 55.6 | 71.4 | 81.8 | 90.0 |
| DEX0477_024.nt.3 | 41945.3 | 70.0 | 82.4 | 55.6 | 71.4 | 81.8 | 90.0 |
| DEX0477_024.nt.3 | 41945.4 | 70.0 | 82.4 | 55.6 | 71.4 | 81.8 | 90.0 |
| DEX0477_024.nt.3 | 41946.0 | 65.0 | 81.2 | 44.4 | 57.1 | 81.8 | 100.0 |
| DEX0477_024.nt.3 | 41946.1 | 70.0 | 82.4 | 55.6 | 71.4 | 81.8 | 90.0 |
| DEX0477_024.nt.3 | 41946.2 | 70.0 | 82.4 | 55.6 | 71.4 | 81.8 | 90.0 |
| DEX0477_024.nt.3 | 41946.3 | 70.0 | 77.8 | 55.6 | 71.4 | 81.8 | 81.8 |
| DEX0477_024.nt.3 | 41946.4 | 70.0 | 77.8 | 55.6 | 71.4 | 81.8 | 81.8 |
| DEX0477_024.nt.4 | 26770.0 | 70.0 | 73.7 | 55.6 | 62.5 | 81.8 | 81.8 |
| DEX0477_024.nt.4 | 26770.1 | 70.0 | 77.8 | 55.6 | 71.4 | 81.8 | 81.8 |
| DEX0477_024.nt.4 | 41945.0 | 65.0 | 76.5 | 44.4 | 57.1 | 81.8 | 90.0 |
| DEX0477_024.nt.4 | 41945.1 | 70.0 | 82.4 | 55.6 | 71.4 | 81.8 | 90.0 |
| DEX0477_024.nt.4 | 41945.2 | 70.0 | 82.4 | 55.6 | 71.4 | 81.8 | 90.0 |
| DEX0477_024.nt.4 | 41945.3 | 70.0 | 82.4 | 55.6 | 71.4 | 81.8 | 90.0 |
| DEX0477_024.nt.4 | 41945.4 | 70.0 | 82.4 | 55.6 | 71.4 | 81.8 | 90.0 |
| DEX0477_024.nt.4 | 41946.0 | 65.0 | 81.2 | 44.4 | 57.1 | 81.8 | 100.0 |
| DEX0477_024.nt.4 | 41946.1 | 70.0 | 82.4 | 55.6 | 71.4 | 81.8 | 90.0 |
| DEX0477_024.nt.4 | 41946.2 | 70.0 | 82.4 | 55.6 | 71.4 | 81.8 | 90.0 |
| DEX0477_024.nt.4 | 41946.3 | 70.0 | 77.8 | 55.6 | 71.4 | 81.8 | 81.8 |
| DEX0477_024.nt.4 | 41946.4 | 70.0 | 77.8 | 55.6 | 71.4 | 81.8 | 81.8 |
| DEX0477_027.nt.1 | 2441.0 | 30.0 | 30.0 | 33.3 | 33.3 | 27.3 | 27.3 |
| DEX0477_027.nt.1 | 5236.0 | 25.0 | 25.0 | 33.3 | 33.3 | 18.2 | 18.2 |
| DEX0477_027.nt.2 | 2441.0 | 30.0 | 30.0 | 33.3 | 33.3 | 27.3 | 27.3 |
| DEX0477_027.nt.2 | 5236.0 | 25.0 | 25.0 | 33.3 | 33.3 | 18.2 | 18.2 |
| DEX0477_027.nt.3 | 2441.0 | 30.0 | 30.0 | 33.3 | 33.3 | 27.3 | 27.3 |
| DEX0477_027.nt.3 | 5236.0 | 25.0 | 25.0 | 33.3 | 33.3 | 18.2 | 18.2 |
| DEX0477_027.nt.4 | 2441.0 | 30.0 | 30.0 | 33.3 | 33.3 | 27.3 | 27.3 |
| DEX0477_027.nt.4 | 5236.0 | 25.0 | 25.0 | 33.3 | 33.3 | 18.2 | 18.2 |
| DEX0477_027.nt.5 | 2441.0 | 30.0 | 30.0 | 33.3 | 33.3 | 27.3 | 27.3 |
| DEX0477_027.nt.5 | 5236.0 | 25.0 | 25.0 | 33.3 | 33.3 | 18.2 | 18.2 |
| DEX0477_027.nt.6 | 2441.0 | 30.0 | 30.0 | 33.3 | 33.3 | 27.3 | 27.3 |
| DEX0477_027.nt.6 | 5236.0 | 25.0 | 25.0 | 33.3 | 33.3 | 18.2 | 18.2 |
| DEX0477_027.nt.7 | 2441.0 | 30.0 | 30.0 | 33.3 | 33.3 | 27.3 | 27.3 |
| DEX0477_027.nt.7 | 5236.0 | 25.0 | 25.0 | 33.3 | 33.3 | 18.2 | 18.2 |
| DEX0477_033.nt.1 | 19534.1 | 5.0 | 12.5 | 11.1 | 33.3 | 0.0 | 0.0 |
| DEX0477_033.nt.1 | 19535.0 | 5.0 | 9.1 | 11.1 | 25.0 | 0.0 | 0.0 |
| DEX0477_033.nt.1 | 19535.1 | 5.0 | 11.1 | 11.1 | 33.3 | 0.0 | 0.0 |
| DEX0477_033.nt.1 | 41957.0 | 5.0 | 7.1 | 11.1 | 25.0 | 0.0 | 0.0 |
| DEX0477_033.nt.1 | 41957.1 | 5.0 | 5.9 | 11.1 | 14.3 | 0.0 | 0.0 |
| DEX0477_033.nt.1 | 41957.2 | 5.0 | 7.7 | 11.1 | 25.0 | 0.0 | 0.0 |
| DEX0477_033.nt.1 | 41958.0 | 5.0 | 6.2 | 11.1 | 16.7 | 0.0 | 0.0 |
| DEX0477_033.nt.1 | 41958.1 | 5.0 | 6.2 | 11.1 | 16.7 | 0.0 | 0.0 |
| DEX0477_033.nt.1 | 41958.2 | 5.0 | 6.7 | 11.1 | 16.7 | 0.0 | 0.0 |
| DEX0477_033.nt.2 | 19534.0 | 0.0 | 0.0 | 0.0 | 0.0 | 0.0 | 0.0 |
| DEX0477_033.nt.2 | 19534.1 | 5.0 | 12.5 | 11.1 | 33.3 | 0.0 | 0.0 |
| DEX0477_033.nt.2 | 19535.0 | 5.0 | 9.1 | 11.1 | 25.0 | 0.0 | 0.0 |
| DEX0477_033.nt.2 | 19535.1 | 5.0 | 11.1 | 11.1 | 33.3 | 0.0 | 0.0 |
| DEX0477_033.nt.2 | 41957.0 | 5.0 | 7.1 | 11.1 | 25.0 | 0.0 | 0.0 |
| DEX0477_033.nt.2 | 41957.1 | 5.0 | 5.9 | 11.1 | 14.3 | 0.0 | 0.0 |
| DEX0477_033.nt.2 | 41957.2 | 5.0 | 7.7 | 11.1 | 25.0 | 0.0 | 0.0 |
| DEX0477_033.nt.2 | 41958.0 | 5.0 | 6.2 | 11.1 | 16.7 | 0.0 | 0.0 |
| DEX0477_033.nt.2 | 41958.1 | 5.0 | 6.2 | 11.1 | 16.7 | 0.0 | 0.0 |
| DEX0477_033.nt.2 | 41958.2 | 5.0 | 6.7 | 11.1 | 16.7 | 0.0 | 0.0 |
| DEX0477_033.nt.3 | 19534.0 | 0.0 | 0.0 | 0.0 | 0.0 | 0.0 | 0.0 |
| DEX0477_033.nt.3 | 19534.1 | 5.0 | 12.5 | 11.1 | 33.3 | 0.0 | 0.0 |
| DEX0477_033.nt.3 | 19535.1 | 5.0 | 11.1 | 11.1 | 33.3 | 0.0 | 0.0 |
| DEX0477_048.nt.1 | 33514.0 | 20.0 | 36.4 | 11.1 | 25.0 | 27.3 | 42.9 |
| DEX0477_048.nt.1 | 33514.1 | 20.0 | 36.4 | 11.1 | 25.0 | 27.3 | 42.9 |
| DEX0477_048.nt.1 | 33515.0 | 20.0 | 21.1 | 11.1 | 11.1 | 27.3 | 30.0 |
| DEX0477_048.nt.1 | 33515.1 | 20.0 | 21.1 | 11.1 | 11.1 | 27.3 | 30.0 |
| DEX0477_048.nt.2 | 33514.0 | 20.0 | 36.4 | 11.1 | 25.0 | 27.3 | 42.9 |
| DEX0477_048.nt.2 | 33514.1 | 20.0 | 36.4 | 11.1 | 25.0 | 27.3 | 42.9 |
| DEX0477_048.nt.2 | 33515.0 | 20.0 | 21.1 | 11.1 | 11.1 | 27.3 | 30.0 |
| DEX0477_048.nt.2 | 33515.1 | 20.0 | 21.1 | 11.1 | 11.1 | 27.3 | 30.0 |
| DEX0477_048.nt.3 | 33514.0 | 20.0 | 36.4 | 11.1 | 25.0 | 27.3 | 42.9 |
| DEX0477_048.nt.3 | 33514.1 | 20.0 | 36.4 | 11.1 | 25.0 | 27.3 | 42.9 |
| DEX0477_048.nt.3 | 33515.0 | 20.0 | 21.1 | 11.1 | 11.1 | 27.3 | 30.0 |
| DEX0477_048.nt.3 | 33515.1 | 20.0 | 21.1 | 11.1 | 11.1 | 27.3 | 30.0 |
| DEX0477_048.nt.4 | 33514.0 | 20.0 | 36.4 | 11.1 | 25.0 | 27.3 | 42.9 |
| DEX0477_048.nt.4 | 33514.1 | 20.0 | 36.4 | 11.1 | 25.0 | 27.3 | 42.9 |
| DEX0477_048.nt.4 | 33515.0 | 20.0 | 21.1 | 11.1 | 11.1 | 27.3 | 30.0 |
| DEX0477_048.nt.4 | 33515.1 | 20.0 | 21.1 | 11.1 | 11.1 | 27.3 | 30.0 |
| DEX0477_052.nt.1 | 10766.0 | 5.0 | 50.0 | 11.1 | 100.0 | 0.0 | 0.0 |
| DEX0477_052.nt.1 | 10766.1 | 5.0 | 50.0 | 11.1 | 100.0 | 0.0 | 0.0 |
| DEX0477_052.nt.1 | 10767.0 | 10.0 | 50.0 | 11.1 | 100.0 | 9.1 | 33.3 |
| DEX0477_052.nt.1 | 10767.1 | 15.0 | 60.0 | 11.1 | 100.0 | 13.2 | 50.0 |
| DEX0477_061.nt.1 | 36403.0 | 35.0 | 35.0 | 44.4 | 44.4 | 27.3 | 27.3 |
| DEX0477_061.nt.1 | 36403.1 | 50.0 | 50.0 | 44.4 | 44.4 | 54.5 | 54.5 |
| DEX0477_061.nt.1 | 36404.0 | 80.0 | 84.2 | 66.7 | 75.0 | 90.9 | 90.9 |
| DEX0477_061.nt.1 | 36404.1 | 75.0 | 78.9 | 55.6 | 55.6 | 90.9 | 100.0 |
| DEX0477_061.nt.2 | 36403.0 | 35.0 | 35.0 | 44.4 | 44.4 | 27.3 | 27.3 |
| DEX0477_061.nt.2 | 36403.1 | 50.0 | 50.0 | 44.4 | 44.4 | 54.5 | 54.5 |
| DEX0477_061.nt.2 | 36404.0 | 80.0 | 84.2 | 66.7 | 75.0 | 90.9 | 90.9 |
| DEX0477_061.nt.2 | 36404.1 | 75.0 | 78.9 | 55.6 | 55.6 | 90.9 | 100.0 |
| DEX0477_065.nt.1 | 4941.0 | 50.0 | 50.0 | 33.3 | 33.3 | 63.6 | 63.6 |
| DEX0477_065.nt.2 | 4941.0 | 50.0 | 50.0 | 33.3 | 33.3 | 63.6 | 63.6 |
| DEX0477_065.nt.3 | 4941.0 | 50.0 | 50.0 | 33.3 | 33.3 | 63.6 | 63.6 |
| DEX0477_066.nt.1 | 4941.0 | 50.0 | 50.0 | 33.3 | 33.3 | 63.6 | 63.6 |
| DEX0477_066.nt.2 | 4941.0 | 50.0 | 50.0 | 33.3 | 33.3 | 63.6 | 63.6 |
| DEX0477_068.nt.1 | 5539.0 | 25.0 | 25.0 | 11.1 | 11.1 | 36.4 | 36.4 |
| DEX0477_070.nt.1 | 3745.0 | 50.0 | 50.0 | 44.4 | 44.4 | 54.5 | 54.5 |

[0577] Colon Cancer Chips

[0578] For colon cancer two different chip designs were evaluated with overlapping sets of a total of 38 samples, comparing the expression patterns of colon cancer derived polyA+ RNA to polyA+ RNA isolated from a pool of 7 normal colon tissues. For the Colon Array Chip all 38 samples (23 Ascending colon carcinomas and 15 Rectosigmoidal carcinomas including: 5 stage I cancers, 15 stage II cancers, 15 stage III and 2 stage IV cancers, as well as 28 Grade1/2 and 10 Grade 3 cancers) were analyzed. The histopathologic grades for cancer are classified as follows: GX, cannot be assessed; G1, well differentiated; G2, Moderately differentiated; G3, poorly differentiated; and G4, undifferentiated. AJCC Cancer Staging Handbook, 5^{th} Edition, 1998, page 9. For the Colon Array Chip analysis, samples were further divided into groups based on the expression pattern of the known colon cancer associated gene Thymidilate Synthase (TS) (13 TS up 25 TS not up). The association of TS with advanced colorectal cancer is well documented. Paradiso et al., Br J Cancer 82(3):560-7 (2000); Etienne et al., J Clin Oncol. 20(12):2832-43 (2002); Aschele et al. Clin Cancer Res. 6(12):4797-802 (2000). For the Multi-Cancer Array Chip a subset of 27 of these samples (14 Ascending colon carcinomas and 13 Rectosigmoidal carcinomas including: 3 stage I cancers, 9 stage II cancers, 13 stage III and 2 stage IV cancers) were assessed. In addition to the tissue samples, five colon cancer cell lines (HT29, SW480, SW620, HCT-16, CaCo2) were analyzed on the Colon Array Chip.

[0579] The results for the statistically significant up-regulated genes on the Colon Array Chip are shown m Table(s) 7-10. The results for the statistically significant up-regulated genes on the Multi-Cancer Array Chip are shown in Table(s) 11-12.

[0580] The first two columns of each table contain information about the sequence itself (Seq ID, Oligo Name), the next columns show the results obtained for all (“ALL”) the colon samples, ascending colon carcinomas (“ASC”), Rectosigmoidal carcinomas (“RS”), cancers corresponding to stages I and II (“ST1,2”), stages III and IV (“ST3,4”), grades 1 and 2 (“GR1,2”), grade 3 (“GR3”), cancers exhibiting up-regulation of the TS gene (“TSup”) or those not exhibiting up-regulation of the TS gene (“NOT TSup”). ‘% up’ indicates the percentage of all experiments in which up-regulation of at least 2-fold was observed n=38 for the Colon Array Chip (n=27 for the Multi-Cancer Array Chip), ‘% valid up’ indicates the percentage of experiments with valid expression values in which up-regulation of at least 2-fold was observed. For the cell lines ‘% up’ indicates the percentage of all experiments in which up-regulation of at least 1.8-fold was observed (n=5 for the Colon Array Chip), ‘% valid up’ indicates the percentage of experiments with valid expression values in which up-regulation of at least 1.8-fold was observed. Additional experiments were performed, generally the results are only reported below if the data showed 30% or greater up-regulation in at least one of the experimental subsets.

TABLE 7

| | | | Cln | | Cln | | Cln | | Cln | | Cln |
|---|---|---|---|---|---|---|---|---|---|---|---|
| | | Cln | ALL % | Cln | ASC % | Cln | RS % | Cln | ST1, 2 % | Cln | ST3, 4 % |
| | | ALL | valid | ASC | valid | RS | valid | ST1, 2 | valid | ST3, 4 | valid |
| | Oligo | % up | up | % up | up | % up | up | % up | up | % up | up |
| DEX ID | Name | n = 38 | n = 38 | n = 23 | n = 23 | n = 15 | n = 15 | n = 20 | n = 20 | n = 18 | n = 18 |
| DEX0477_007.nt.1 | 17852.0 | 76.3 | 76.3 | 78.3 | 78.3 | 73.3 | 73.3 | 80.0 | 80.0 | 72.2 | 72.2 |
| DEX0477_007.nt.1 | 17853.0 | 76.3 | 76.3 | 78.3 | 78.3 | 73.3 | 73.3 | 80.0 | 80.0 | 72.2 | 72.2 |
| DEX0477_007.nt.1 | 18644.0 | 73.7 | 73.7 | 78.3 | 78.3 | 66.7 | 66.7 | 75.0 | 75.0 | 72.2 | 72.2 |
| DEX0477_007.nt.1 | 18644.1 | 73.7 | 73.7 | 78.3 | 78.3 | 66.7 | 66.7 | 75.0 | 75.0 | 72.2 | 72.2 |
| DEX0477_007.nt.1 | 18645.0 | 76.3 | 76.3 | 78.3 | 78.3 | 73.3 | 73.3 | 80.0 | 80.0 | 72.2 | 72.2 |
| DEX0477_007.nt.1 | 18645.1 | 76.3 | 76.3 | 78.3 | 78.3 | 73.3 | 73.3 | 80.0 | 80.0 | 72.2 | 72.2 |
| DEX0477_009.nt.1 | 36563.0 | 42.1 | 42.1 | 47.8 | 47.8 | 33.3 | 33.3 | 35.0 | 35.0 | 50.0 | 50.0 |
| DEX0477_009.nt.1 | 36564.0 | 34.2 | 34.2 | 39.1 | 39.1 | 26.7 | 26.7 | 30.0 | 30.0 | 38.9 | 38.9 |
| DEX0477_031.nt.1 | 38628.0 | 28.9 | 28.9 | 34.8 | 34.8 | 20.0 | 20.0 | 20.0 | 20.0 | 38.9 | 38.9 |
| DEX0477_032.nt.1 | 41923.0 | 10.5 | 11.1 | 13.0 | 13.0 | 6.7 | 7.7 | 10.0 | 11.1 | 11.1 | 11.1 |
| DEX0477_032.nt.1 | 41924.0 | 13.2 | 14.3 | 17.4 | 18.2 | 6.7 | 7.7 | 10.0 | 11.8 | 16.7 | 16.7 |
| DEX0477_033.nt.1 | 19534.0 | 36.8 | 36.8 | 43.5 | 43.5 | 26.7 | 26.7 | 25.0 | 25.0 | 50.0 | 50.0 |
| DEX0477_033.nt.1 | 19534.1 | 36.8 | 36.8 | 43.5 | 43.5 | 26.7 | 26.7 | 25.0 | 25.0 | 50.0 | 50.0 |
| DEX0477_033.nt.1 | 19535.0 | 36.8 | 36.8 | 39.1 | 39.1 | 33.3 | 33.3 | 30.0 | 30.0 | 44.4 | 44.4 |
| DEX0477_033.nt.1 | 19535.1 | 36.8 | 36.8 | 39.1 | 39.1 | 33.3 | 33.3 | 30.0 | 30.0 | 44.4 | 44.4 |
| DEX0477_033.nt.1 | 35174.0 | 42.1 | 42.1 | 47.8 | 47.8 | 33.3 | 33.3 | 35.0 | 35.0 | 50.0 | 50.0 |
| DEX0477_033.nt.1 | 35175.0 | 36.8 | 36.8 | 39.1 | 39.1 | 33.3 | 33.3 | 30.0 | 30.0 | 44.4 | 44.4 |
| DEX0477_033.nt.1 | 38703.0 | 36.8 | 36.8 | 43.5 | 43.5 | 26.7 | 26.7 | 25.0 | 25.0 | 50.0 | 50.0 |
| DEX0477_033.nt.1 | 38704.0 | 28.9 | 28.9 | 34.8 | 34.8 | 20.0 | 20.0 | 15.0 | 15.0 | 44.4 | 44.4 |
| DEX0477_033.nt.2 | 19534.0 | 36.8 | 36.8 | 43.5 | 43.5 | 26.7 | 26.7 | 25.0 | 25.0 | 50.0 | 50.0 |
| DEX0477_033.nt.2 | 19534.1 | 36.8 | 36.8 | 43.5 | 43.5 | 26.7 | 26.7 | 25.0 | 25.0 | 50.0 | 50.0 |
| DEX0477_033.nt.2 | 19535.0 | 36.8 | 36.8 | 39.1 | 39.1 | 33.3 | 33.3 | 30.0 | 30.0 | 44.4 | 44.4 |
| DEX0477_033.nt.2 | 19535.1 | 36.8 | 36.8 | 39.1 | 39.1 | 33.3 | 33.3 | 30.0 | 30.0 | 44.4 | 44.4 |
| DEX0477_033.nt.2 | 35174.0 | 42.1 | 42.1 | 47.8 | 47.8 | 33.3 | 33.3 | 35.0 | 35.0 | 50.0 | 50.0 |
| DEX0477_033.nt.2 | 35175.0 | 36.8 | 36.8 | 39.1 | 39.1 | 33.3 | 33.3 | 30.0 | 30.0 | 44.4 | 44.4 |
| DEX0477_033.nt.2 | 38703.0 | 36.8 | 36.8 | 43.5 | 43.5 | 26.7 | 26.7 | 25.0 | 25.0 | 50.0 | 50.0 |
| DEX0477_033.nt.2 | 38704.0 | 28.9 | 28.9 | 34.8 | 34.8 | 20.0 | 20.0 | 15.0 | 15.0 | 44.4 | 44.4 |
| DEX0477_033.nt.3 | 19534.0 | 36.8 | 36.8 | 43.5 | 43.5 | 26.7 | 26.7 | 25.0 | 25.0 | 50.0 | 50.0 |
| DEX0477_033.nt.3 | 19534.1 | 36.8 | 36.8 | 43.5 | 43.5 | 26.7 | 26.7 | 25.0 | 25.0 | 50.0 | 50.0 |
| DEX0477_033.nt.3 | 19535.0 | 36.8 | 36.8 | 39.1 | 39.1 | 33.3 | 33.3 | 30.0 | 30.0 | 44.4 | 44.4 |
| DEX0477_033.nt.3 | 19535.1 | 36.8 | 36.8 | 39.1 | 39.1 | 33.3 | 33.3 | 30.0 | 30.0 | 44.4 | 44.4 |
| DEX0477_033.nt.3 | 35174.0 | 42.1 | 42.1 | 47.8 | 47.8 | 33.3 | 33.3 | 35.0 | 35.0 | 50.0 | 50.0 |
| DEX0477_033.nt.3 | 35175.0 | 36.8 | 36.8 | 39.1 | 39.1 | 33.3 | 33.3 | 30.0 | 30.0 | 44.4 | 44.4 |
| DEX0477_033.nt.3 | 38703.0 | 36.8 | 36.8 | 43.5 | 43.5 | 26.7 | 26.7 | 25.0 | 25.0 | 50.0 | 50.0 |
| DEX0477_033.nt.3 | 38704.0 | 28.9 | 28.9 | 34.8 | 34.8 | 20.0 | 20.0 | 15.0 | 15.0 | 44.4 | 44.4 |
| DEX0477_037.nt.1 | 34940.0 | 23.7 | 23.7 | 30.4 | 30.4 | 13.3 | 13.3 | 25.0 | 25.0 | 22.2 | 22.2 |
| DEX0477_038.nt.1 | 10208.0 | 39.5 | 42.9 | 47.8 | 52.4 | 26.7 | 28.6 | 55.0 | 55.0 | 22.2 | 26.7 |
| DEX0477_038.nt.1 | 10209.0 | 39.5 | 40.5 | 47.8 | 47.8 | 26.7 | 28.6 | 55.0 | 55.0 | 22.2 | 23.5 |
| DEX0477_038.nt.2 | 10208.0 | 39.5 | 42.9 | 47.8 | 52.4 | 26.7 | 28.6 | 55.0 | 55.0 | 22.2 | 26.7 |
| DEX0477_038.nt.2 | 10209.0 | 39.5 | 40.5 | 47.8 | 47.8 | 26.7 | 28.6 | 55.0 | 55.0 | 22.2 | 23.5 |
| DEX0477_038.nt.3 | 10208.0 | 39.5 | 42.9 | 47.8 | 52.4 | 26.7 | 28.6 | 55.0 | 55.0 | 22.2 | 26.7 |
| DEX0477_038.nt.3 | 10209.0 | 39.5 | 40.5 | 47.8 | 47.8 | 26.7 | 28.6 | 55.0 | 55.0 | 22.2 | 23.5 |
| DEX0477_039.nt.1 | 38628.0 | 28.9 | 28.9 | 34.8 | 34.8 | 20.0 | 20.0 | 20.0 | 20.0 | 38.9 | 38.9 |
| DEX0477_058.nt.1 | 35264.0 | 31.6 | 31.6 | 30.4 | 30.4 | 33.3 | 33.3 | 20.0 | 20.0 | 44.4 | 44.4 |
| DEX0477_058.nt.1 | 35265.0 | 28.9 | 28.9 | 26.1 | 26.1 | 33.3 | 33.3 | 20.0 | 20.0 | 38.9 | 38.9 |
| DEX0477_058.nt.2 | 35264.0 | 31.6 | 31.6 | 30.4 | 30.4 | 33.3 | 33.3 | 20.0 | 20.0 | 44.4 | 44.4 |
| DEX0477_058.nt.2 | 35265.0 | 28.9 | 28.9 | 26.1 | 26.1 | 33.3 | 33.3 | 20.0 | 20.0 | 38.9 | 38.9 |
| DEX0477_059.nt.1 | 33732.0 | 57.9 | 62.9 | 52.2 | 57.1 | 66.7 | 71.4 | 50.0 | 55.6 | 66.7 | 70.6 |
| DEX0477_059.nt.1 | 33733.0 | 60.5 | 69.7 | 52.2 | 57.1 | 73.3 | 91.7 | 55.0 | 61.1 | 66.7 | 80.0 |
| DEX0477_059.nt.2 | 33732.0 | 57.9 | 62.9 | 52.2 | 57.1 | 66.7 | 71.4 | 50.0 | 55.6 | 66.7 | 70.6 |
| DEX0477_059.nt.2 | 33733.0 | 60.5 | 69.7 | 52.2 | 57.1 | 73.3 | 91.7 | 55.0 | 61.1 | 66.7 | 80.0 |
| DEX0477_060.nt.1 | 35080.0 | 57.9 | 59.5 | 60.9 | 60.9 | 53.3 | 57.1 | 60.0 | 63.2 | 55.6 | 55.6 |
| DEX0477_060.nt.1 | 35081.0 | 44.7 | 50.0 | 43.5 | 50.0 | 46.7 | 50.0 | 45.0 | 50.0 | 44.4 | 50.0 |
| DEX0477_060.nt.1 | 35760.0 | 13.2 | 13.5 | 8.7 | 9.1 | 20.0 | 20.0 | 15.0 | 15.0 | 11.1 | 11.8 |
| DEX0477_060.nt.1 | 35761.0 | 18.4 | 29.2 | 17.4 | 23.5 | 20.0 | 42.9 | 20.0 | 28.6 | 16.7 | 30.0 |
| DEX0477_060.nt.2 | 35080.0 | 57.9 | 59.5 | 60.9 | 60.9 | 53.3 | 57.1 | 60.0 | 63.2 | 55.6 | 55.6 |
| DEX0477_060.nt.2 | 35081.0 | 44.7 | 50.0 | 43.5 | 50.0 | 46.7 | 50.0 | 45.0 | 50.0 | 44.4 | 50.0 |
| DEX0477_060.nt.2 | 35760.0 | 13.2 | 13.5 | 8.7 | 9.1 | 20.0 | 20.0 | 15.0 | 15.0 | 11.1 | 11.8 |
| DEX0477_060.nt.2 | 35761.0 | 18.4 | 29.2 | 17.4 | 23.5 | 20.0 | 42.9 | 20.0 | 28.6 | 16.7 | 30.0 |
| DEX0477_062.nt.1 | 28401.0 | 13.2 | 13.2 | 21.7 | 21.7 | 0.0 | 0.0 | 15.0 | 15.0 | 11.1 | 11.1 |
| DEX0477_062.nt.1 | 28402.0 | 21.1 | 21.1 | 26.1 | 26.1 | 13.3 | 13.3 | 20.0 | 20.0 | 22.2 | 22.2 |
| DEX0477_063.nt.1 | 28637.0 | 73.7 | 73.7 | 82.6 | 82.6 | 60.0 | 60.0 | 70.0 | 70.0 | 77.8 | 77.8 |
| DEX0477_063.nt.1 | 28638.0 | 65.8 | 65.8 | 73.9 | 73.9 | 53.3 | 53.3 | 70.0 | 70.0 | 61.1 | 61.1 |
| DEX0477_063.nt.2 | 28637.0 | 73.7 | 73.7 | 82.6 | 82.6 | 60.0 | 60.0 | 70.0 | 70.0 | 77.8 | 77.8 |
| DEX0477_063.nt.2 | 28638.0 | 65.8 | 65.8 | 73.9 | 73.9 | 53.3 | 53.3 | 70.0 | 70.0 | 61.1 | 61.1 |
| DEX0477_064.nt.1 | 35559.0 | 36.8 | 38.9 | 30.4 | 33.3 | 46.7 | 46.7 | 30.0 | 31.6 | 44.4 | 47.1 |
| DEX0477_067.nt.1 | 36348.0 | 52.6 | 54.1 | 52.2 | 54.5 | 53.3 | 53.3 | 65.0 | 68.4 | 38.9 | 38.9 |
| DEX0477_069.nt.1 | 34086.0 | 2.6 | 2.9 | 4.3 | 4.8 | 0.0 | 0.0 | 0.0 | 0.0 | 5.6 | 6.2 |
| DEX0477_073.nt.1 | 33760.0 | 47.4 | 48.6 | 43.5 | 43.5 | 53.3 | 57.1 | 30.0 | 30.0 | 66.7 | 70.6 |
| DEX0477_073.nt.2 | 33760.0 | 47.4 | 48.6 | 43.5 | 43.5 | 53.3 | 57.1 | 30.0 | 30.0 | 66.7 | 70.6 |
| DEX0477_074.nt.1 | 33760.0 | 47.4 | 48.6 | 43.5 | 43.5 | 53.3 | 57.1 | 30.0 | 30.0 | 66.7 | 70.6 |
| DEX0477_075.nt.1 | 30637.0 | 81.6 | 83.8 | 91.3 | 95.5 | 66.7 | 66.7 | 75.0 | 78.9 | 88.9 | 88.9 |
| DEX0477_075.nt.1 | 30638.0 | 78.9 | 81.1 | 82.6 | 86.4 | 73.3 | 73.3 | 70.0 | 73.7 | 88.9 | 88.9 |
| DEX0477_077.nt.1 | 34002.0 | 60.5 | 60.5 | 56.5 | 56.5 | 66.7 | 66.7 | 65.0 | 65.0 | 55.6 | 55.6 |
| DEX0477_077.nt.1 | 34003.0 | 65.8 | 65.8 | 65.2 | 65.2 | 66.7 | 66.7 | 75.0 | 75.0 | 55.6 | 55.6 |
| DEX0477_077.nt.1 | 38323.0 | 50.0 | 51.4 | 47.8 | 50.0 | 53.3 | 53.3 | 60.0 | 63.2 | 38.9 | 38.9 |
| DEX0477_077.nt.1 | 38324.0 | 57.9 | 59.5 | 52.2 | 54.5 | 66.7 | 66.7 | 65.0 | 68.4 | 50.0 | 50.0 |
| DEX0477_078.nt.1 | 8312.0 | 2.6 | 2.8 | 4.3 | 4.3 | 0.0 | 0.0 | 0.0 | 0.0 | 5.6 | 5.9 |
| DEX0477_078.nt.1 | 8313.0 | 23.7 | 25.7 | 26.1 | 27.3 | 20.0 | 23.1 | 20.0 | 22.2 | 27.8 | 29.4 |
| DEX0477_079.nt.1 | 10992.0 | 15.8 | 15.8 | 21.7 | 21.7 | 6.7 | 6.7 | 20.0 | 20.0 | 11.1 | 11.1 |
| DEX0477_079.nt.1 | 10993.0 | 13.2 | 13.2 | 21.7 | 21.7 | 0.0 | 0.0 | 10.0 | 10.0 | 16.7 | 16.7 |

[0581] TABLE 8

| | | | Cln | | Cln | | Cln | | Cln | | Cln |
|---|---|---|---|---|---|---|---|---|---|---|---|
| | | Cln | 550 | Cln | 550 | Cln | 550 | Cln | 550 | Cln | 550 |
| | | 550 | ALL % | 550 | ASC % | 550 | RS % | 550 | ST1, 2 % | 550 | ST3, 4 % |
| | | ALL | valid | ASC | valid | RS | valid | ST1, 2 | valid | ST3, 4 | valid |
| | Oligo | % up | up | % up | up | % up | up | % up | up | % up | up |
| DEX ID | Name | n = 38 | n = 38 | n = 23 | n = 23 | n = 15 | n = 15 | n = 20 | n = 20 | n = 18 | n = 18 |
| DEX0477_007.nt.1 | 17852.0 | 71.1 | 71.1 | 78.3 | 78.3 | 60.0 | 60.0 | 75.0 | 75.0 | 66.7 | 66.7 |
| DEX0477_007.nt.1 | 17853.0 | 73.7 | 73.7 | 78.3 | 78.3 | 66.7 | 66.7 | 80.0 | 80.0 | 66.7 | 66.7 |
| DEX0477_007.nt.1 | 18644.0 | 71.1 | 71.1 | 78.3 | 78.3 | 60.0 | 60.0 | 75.0 | 75.0 | 66.7 | 66.7 |
| DEX0477_007.nt.1 | 18644.1 | 71.1 | 71.1 | 78.3 | 78.3 | 60.0 | 60.0 | 75.0 | 75.0 | 66.7 | 66.7 |
| DEX0477_007.nt.1 | 18645.0 | 73.7 | 73.7 | 78.3 | 78.3 | 66.7 | 66.7 | 80.0 | 80.0 | 66.7 | 66.7 |
| DEX0477_007.nt.1 | 18645.1 | 76.3 | 76.3 | 78.3 | 78.3 | 73.3 | 73.3 | 80.0 | 80.0 | 72.2 | 72.2 |
| DEX0477_009.nt.1 | 36563.0 | 36.8 | 36.8 | 39.1 | 39.1 | 33.3 | 33.3 | 30.0 | 30.0 | 44.4 | 44.4 |
| DEX0477_009.nt.1 | 36564.0 | 31.6 | 31.6 | 34.8 | 34.8 | 26.7 | 26.7 | 30.0 | 30.0 | 33.3 | 33.3 |
| DEX0477_010.nt.1 | 20501.0 | 13.2 | 13.2 | 17.4 | 17.4 | 6.7 | 6.7 | 20.0 | 20.0 | 5.6 | 5.6 |
| DEX0477_010.nt.1 | 20502.0 | 10.5 | 10.5 | 13.0 | 13.0 | 6.7 | 6.7 | 15.0 | 15.0 | 5.6 | 5.6 |
| DEX0477_031.nt.1 | 38628.0 | 23.7 | 23.7 | 34.8 | 34.8 | 6.7 | 6.7 | 15.0 | 15.0 | 33.3 | 33.3 |
| DEX0477_032.nt.1 | 41923.0 | 10.5 | 11.8 | 13.0 | 13.6 | 6.7 | 8.3 | 10.0 | 12.5 | 11.1 | 11.1 |
| DEX0477_032.nt.1 | 41924.0 | 15.8 | 18.8 | 21.7 | 23.8 | 6.7 | 9.1 | 15.0 | 18.8 | 16.7 | 18.8 |
| DEX0477_033.nt.1 | 19534.0 | 31.6 | 31.6 | 34.8 | 34.8 | 26.7 | 26.7 | 20.0 | 20.0 | 44.4 | 44.4 |
| DEX0477_033.nt.1 | 19534.1 | 31.6 | 31.6 | 39.1 | 39.1 | 20.0 | 20.0 | 15.0 | 15.0 | 50.0 | 50.0 |
| DEX0477_033.nt.1 | 19535.0 | 34.2 | 34.2 | 34.8 | 34.8 | 33.3 | 33.3 | 25.0 | 25.0 | 44.4 | 44.4 |
| DEX0477_033.nt.1 | 19535.1 | 34.2 | 34.2 | 39.1 | 39.1 | 26.7 | 26.7 | 25.0 | 25.0 | 44.4 | 44.4 |
| DEX0477_033.nt.1 | 35174.0 | 34.2 | 34.2 | 39.1 | 39.1 | 26.7 | 26.7 | 20.0 | 20.0 | 50.0 | 50.0 |
| DEX0477_033.nt.1 | 35175.0 | 36.8 | 36.8 | 39.1 | 39.1 | 33.3 | 33.3 | 30.0 | 30.0 | 44.4 | 44.4 |
| DEX0477_033.nt.1 | 38703.0 | 34.2 | 34.2 | 39.1 | 39.1 | 26.7 | 26.7 | 25.0 | 25.0 | 44.4 | 44.4 |
| DEX0477_033.nt.1 | 38704.0 | 26.3 | 26.3 | 34.8 | 34.8 | 13.3 | 13.3 | 15.0 | 15.0 | 38.9 | 38.9 |
| DEX0477_033.nt.2 | 19534.0 | 31.6 | 31.6 | 34.8 | 34.8 | 26.7 | 26.7 | 20.0 | 20.0 | 44.4 | 44.4 |
| DEX0477_033.nt.2 | 19534.1 | 31.6 | 31.6 | 39.1 | 39.1 | 20.0 | 20.0 | 15.0 | 15.0 | 50.0 | 50.0 |
| DEX0477_033.nt.2 | 19535.0 | 34.2 | 34.2 | 34.8 | 34.8 | 33.3 | 33.3 | 25.0 | 25.0 | 44.4 | 44.4 |
| DEX0477_033.nt.2 | 19535.1 | 34.2 | 34.2 | 39.1 | 39.1 | 26.7 | 26.7 | 25.0 | 25.0 | 44.4 | 44.4 |
| DEX0477_033.nt.2 | 35174.0 | 34.2 | 34.2 | 39.1 | 39.1 | 26.7 | 26.7 | 20.0 | 20.0 | 50.0 | 50.0 |
| DEX0477_033.nt.2 | 35175.0 | 36.8 | 36.8 | 39.1 | 39.1 | 33.3 | 33.3 | 30.0 | 30.0 | 44.4 | 44.4 |
| DEX0477_033.nt.2 | 38703.0 | 34.2 | 34.2 | 39.1 | 39.1 | 26.7 | 26.7 | 25.0 | 25.0 | 44.4 | 44.4 |
| DEX0477_033.nt.2 | 38704.0 | 26.3 | 26.3 | 34.8 | 34.8 | 13.3 | 13.3 | 15.0 | 15.0 | 38.9 | 38.9 |
| DEX0477_033.nt.3 | 19534.0 | 31.6 | 31.6 | 34.8 | 34.8 | 26.7 | 26.7 | 20.0 | 20.0 | 44.4 | 44.4 |
| DEX0477_033.nt.3 | 19534.1 | 31.6 | 31.6 | 39.1 | 39.1 | 20.0 | 20.0 | 15.0 | 15.0 | 50.0 | 50.0 |
| DEX0477_033.nt.3 | 19535.0 | 34.2 | 34.2 | 34.8 | 34.8 | 33.3 | 33.3 | 25.0 | 25.0 | 44.4 | 44.4 |
| DEX0477_033.nt.3 | 19535.1 | 34.2 | 34.2 | 39.1 | 39.1 | 26.7 | 26.7 | 25.0 | 25.0 | 44.4 | 44.4 |
| DEX0477_033.nt.3 | 35174.0 | 34.2 | 34.2 | 39.1 | 39.1 | 26.7 | 26.7 | 20.0 | 20.0 | 50.0 | 50.0 |
| DEX0477_033.nt.3 | 35175.0 | 36.8 | 36.8 | 39.1 | 39.1 | 33.3 | 33.3 | 30.0 | 30.0 | 44.4 | 44.4 |
| DEX0477_033.nt.3 | 38703.0 | 34.2 | 34.2 | 39.1 | 39.1 | 26.7 | 26.7 | 25.0 | 25.0 | 44.4 | 44.4 |
| DEX0477_033.nt.3 | 38704.0 | 26.3 | 26.3 | 34.8 | 34.8 | 13.3 | 13.3 | 15.0 | 15.0 | 38.9 | 38.9 |
| DEX0477_038.nt.1 | 10208.0 | 39.5 | 46.9 | 47.8 | 57.9 | 26.7 | 30.8 | 50.0 | 52.6 | 27.8 | 38.5 |
| DEX0477_038.nt.1 | 10209.0 | 39.5 | 44.1 | 47.8 | 52.4 | 26.7 | 30.8 | 55.0 | 57.9 | 22.2 | 26.7 |
| DEX0477_038.nt.2 | 10208.0 | 39.5 | 46.9 | 47.8 | 57.9 | 26.7 | 30.8 | 50.0 | 52.6 | 27.8 | 38.5 |
| DEX0477_038.nt.2 | 10209.0 | 39.5 | 44.1 | 47.8 | 52.4 | 26.7 | 30.8 | 55.0 | 57.9 | 22.2 | 26.7 |
| DEX0477_038.nt.3 | 10208.0 | 39.5 | 46.9 | 47.8 | 57.9 | 26.7 | 30.8 | 50.0 | 52.6 | 27.8 | 38.5 |
| DEX0477_038.nt.3 | 10209.0 | 39.5 | 44.1 | 47.8 | 52.4 | 26.7 | 30.8 | 55.0 | 57.9 | 22.2 | 26.7 |
| DEX0477_039.nt.1 | 37429.0 | 2.6 | 2.6 | 4.3 | 4.3 | 0.0 | 0.0 | 5.0 | 5.0 | 0.0 | 0.0 |
| DEX0477_039.nt.1 | 38625.0 | 10.5 | 10.5 | 17.4 | 17.4 | 0.0 | 0.0 | 10.0 | 10.0 | 11.1 | 11.1 |
| DEX0477_039.nt.1 | 38628.0 | 23.7 | 23.7 | 34.8 | 34.8 | 6.7 | 6.7 | 15.0 | 15.0 | 33.3 | 33.3 |
| DEX0477_058.nt.1 | 35264.0 | 23.7 | 23.7 | 21.7 | 21.7 | 26.7 | 26.7 | 15.0 | 15.0 | 33.3 | 33.3 |
| DEX0477_058.nt.1 | 35265.0 | 23.7 | 23.7 | 21.7 | 21.7 | 26.7 | 26.7 | 15.0 | 15.0 | 33.3 | 33.3 |
| DEX0477_058.nt.2 | 35264.0 | 23.7 | 23.7 | 21.7 | 21.7 | 26.7 | 26.7 | 15.0 | 15.0 | 33.3 | 33.3 |
| DEX0477_058.nt.2 | 35265.0 | 23.7 | 23.7 | 21.7 | 21.7 | 26.7 | 26.7 | 15.0 | 15.0 | 33.3 | 33.3 |
| DEX0477_059.nt.1 | 33732.0 | 57.9 | 73.3 | 52.2 | 66.7 | 66.7 | 83.3 | 55.0 | 73.3 | 61.1 | 73.3 |
| DEX0477_059.nt.1 | 33733.0 | 55.3 | 84.0 | 43.5 | 71.4 | 73.3 | 100.0 | 50.0 | 83.3 | 61.1 | 84.6 |
| DEX0477_059.nt.2 | 33732.0 | 57.9 | 73.3 | 52.2 | 66.7 | 66.7 | 83.3 | 55.0 | 73.3 | 61.1 | 73.3 |
| DEX0477_059.nt.2 | 33733.0 | 55.3 | 84.0 | 43.5 | 71.4 | 73.3 | 100.0 | 50.0 | 83.3 | 61.1 | 84.6 |
| DEX0477_060.nt.1 | 35080.0 | 52.6 | 57.1 | 52.2 | 57.1 | 53.3 | 57.1 | 55.0 | 57.9 | 50.0 | 56.2 |
| DEX0477_060.nt.1 | 35081.0 | 42.1 | 53.3 | 39.1 | 50.0 | 46.7 | 58.3 | 40.0 | 50.0 | 44.4 | 57.1 |
| DEX0477_060.nt.1 | 35760.0 | 7.9 | 8.6 | 4.3 | 5.0 | 13.3 | 13.3 | 5.0 | 5.3 | 11.1 | 12.5 |
| DEX0477_060.nt.1 | 35761.0 | 10.5 | 40.0 | 8.7 | 28.6 | 13.3 | 66.7 | 5.0 | 20.0 | 16.7 | 60.0 |
| DEX0477_060.nt.2 | 35080.0 | 52.6 | 57.1 | 52.2 | 57.1 | 53.3 | 57.1 | 55.0 | 57.9 | 50.0 | 56.2 |
| DEX0477_060.nt.2 | 35081.0 | 42.1 | 53.3 | 39.1 | 50.0 | 46.7 | 58.3 | 40.0 | 50.0 | 44.4 | 57.1 |
| DEX0477_060.nt.2 | 35760.0 | 7.9 | 8.6 | 4.3 | 5.0 | 13.3 | 13.3 | 5.0 | 5.3 | 11.1 | 12.5 |
| DEX0477_060.nt.2 | 35761.0 | 10.5 | 40.0 | 8.7 | 28.6 | 13.3 | 66.7 | 5.0 | 20.0 | 16.7 | 60.0 |
| DEX0477_062.nt.1 | 28401.0 | 13.2 | 13.2 | 21.7 | 21.7 | 0.0 | 0.0 | 15.0 | 15.0 | 11.1 | 11.1 |
| DEX0477_062.nt.1 | 28402.0 | 18.4 | 18.4 | 26.1 | 26.1 | 6.7 | 6.7 | 20.0 | 20.0 | 16.7 | 16.7 |
| DEX0477_063.nt.1 | 28637.0 | 63.2 | 63.2 | 73.9 | 73.9 | 46.7 | 46.7 | 65.0 | 65.0 | 61.1 | 61.1 |
| DEX0477_063.nt.1 | 28638.0 | 60.5 | 60.5 | 73.9 | 73.9 | 40.0 | 40.0 | 65.0 | 65.0 | 55.6 | 55.6 |
| DEX0477_063.nt.2 | 28637.0 | 63.2 | 63.2 | 73.9 | 73.9 | 46.7 | 46.7 | 65.0 | 65.0 | 61.1 | 61.1 |
| DEX0477_063.nt.2 | 28638.0 | 60.5 | 60.5 | 73.9 | 73.9 | 40.0 | 40.0 | 65.0 | 65.0 | 55.6 | 55.6 |
| DEX0477_064.nt.1 | 35559.0 | 39.5 | 39.5 | 34.8 | 34.8 | 46.7 | 46.7 | 35.0 | 35.0 | 44.4 | 44.4 |
| DEX0477_067.nt.1 | 36348.0 | 55.3 | 55.3 | 56.5 | 56.5 | 53.3 | 53.3 | 70.0 | 70.0 | 38.9 | 38.9 |
| DEX0477_069.nt.1 | 34086.0 | 2.6 | 3.3 | 4.3 | 5.6 | 0.0 | 0.0 | 0.0 | 0.0 | 5.6 | 7.7 |
| DEX0477_073.nt.1 | 33760.0 | 39.5 | 40.5 | 34.8 | 34.8 | 46.7 | 50.0 | 30.0 | 30.0 | 50.0 | 52.9 |
| DEX0477_073.nt.2 | 33760.0 | 39.5 | 40.5 | 34.8 | 34.8 | 46.7 | 50.0 | 30.0 | 30.0 | 50.0 | 52.9 |
| DEX0477_074.nt.1 | 33760.0 | 39.5 | 40.5 | 34.8 | 34.8 | 46.7 | 50.0 | 30.0 | 30.0 | 50.0 | 52.9 |
| DEX0477_075.nt.1 | 30637.0 | 81.6 | 81.6 | 91.3 | 91.3 | 66.7 | 66.7 | 75.0 | 75.0 | 88.9 | 88.9 |
| DEX0477_075.nt.1 | 30638.0 | 76.3 | 76.3 | 82.6 | 82.6 | 66.7 | 66.7 | 70.0 | 70.0 | 83.3 | 83.3 |
| DEX0477_077.nt.1 | 34002.0 | 55.3 | 55.3 | 52.2 | 52.2 | 60.0 | 60.0 | 65.0 | 65.0 | 44.4 | 44.4 |
| DEX0477_077.nt.1 | 34003.0 | 63.2 | 63.2 | 60.9 | 60.9 | 66.7 | 66.7 | 70.0 | 70.0 | 55.6 | 55.6 |
| DEX0477_077.nt.1 | 38323.0 | 50.0 | 52.8 | 47.8 | 52.4 | 53.3 | 53.3 | 60.0 | 63.2 | 38.9 | 41.2 |
| DEX0477_077.nt.1 | 38324.0 | 55.3 | 61.8 | 52.2 | 60.0 | 60.0 | 64.3 | 65.0 | 72.2 | 44.4 | 50.0 |
| DEX0477_078.nt.1 | 8313.0 | 18.4 | 24.1 | 17.4 | 21.1 | 20.0 | 30.0 | 10.0 | 13.3 | 27.8 | 35.7 |

[0582] TABLE 9

| | | | | | | | | | Cln |
|---|---|---|---|---|---|---|---|---|---|
| | | | Cln | | Cln | | Cln | Cln | NOT |
| | | Cln | GR1, 2 % | Cln | GR3 % | Cln | TS up % | NOT | TS up % |
| | | GR1, 2 | valid | GR3 | valid | TS up | valid | TS up | valid |
| | Oligo | % up | up | % up | up | % up | up | % up | up |
| DEX ID | Name | n = 28 | n = 28 | n = 10 | n = 10 | n = 13 | n = 13 | n = 25 | n = 25 |
| DEX0477_005.nt.1 | 20501.0 | 17.9 | 17.9 | 0.0 | 0.0 | 38.5 | 38.5 | 0.0 | 0.0 |
| DEX0477_005.nt.1 | 20502.0 | 17.9 | 17.9 | 0.0 | 0.0 | 38.5 | 38.5 | 0.0 | 0.0 |
| DEX0477_007.nt.1 | 17852.0 | 78.6 | 78.6 | 70.0 | 70.0 | 92.3 | 92.3 | 68.0 | 68.0 |
| DEX0477_007.nt.1 | 17853.0 | 78.6 | 78.6 | 70.0 | 70.0 | 92.3 | 92.3 | 68.0 | 68.0 |
| DEX0477_007.nt.1 | 18644.0 | 75.0 | 75.0 | 70.0 | 70.0 | 84.6 | 84.6 | 68.0 | 68.0 |
| DEX0477_007.nt.1 | 18644.1 | 75.0 | 75.0 | 70.0 | 70.0 | 84.6 | 84.6 | 68.0 | 68.0 |
| DEX0477_007.nt.1 | 18645.0 | 78.6 | 78.6 | 70.0 | 70.0 | 92.3 | 92.3 | 68.0 | 68.0 |
| DEX0477_007.nt.1 | 18645.1 | 78.6 | 78.6 | 70.0 | 70.0 | 92.3 | 92.3 | 68.0 | 68.0 |
| DEX0477_009.nt.1 | 36563.0 | 35.7 | 35.7 | 60.0 | 60.0 | 69.2 | 69.2 | 28.0 | 28.0 |
| DEX0477_009.nt.1 | 36564.0 | 28.6 | 28.6 | 50.0 | 50.0 | 61.5 | 61.5 | 20.0 | 20.0 |
| DEX0477_010.nt.1 | 20501.0 | 17.9 | 17.9 | 0.0 | 0.0 | 38.5 | 38.5 | 0.0 | 0.0 |
| DEX0477_010.nt.1 | 20502.0 | 17.9 | 17.9 | 0.0 | 0.0 | 38.5 | 38.5 | 0.0 | 0.0 |
| DEX0477_031.nt.1 | 38625.0 | 7.1 | 7.1 | 20.0 | 20.0 | 30.8 | 30.8 | 0.0 | 0.0 |
| DEX0477_031.nt.1 | 38628.0 | 28.6 | 28.6 | 30.0 | 30.0 | 38.5 | 38.5 | 24.0 | 24.0 |
| DEX0477_032.nt.1 | 41923.0 | 3.6 | 3.8 | 30.0 | 30.0 | 23.1 | 25.0 | 4.0 | 4.2 |
| DEX0477_032.nt.1 | 41924.0 | 3.6 | 4.0 | 40.0 | 40.0 | 23.1 | 25.0 | 8.0 | 8.7 |
| DEX0477_033.nt.1 | 19534.0 | 35.7 | 35.7 | 40.0 | 40.0 | 38.5 | 38.5 | 36.0 | 36.0 |
| DEX0477_033.nt.1 | 19534.1 | 35.7 | 35.7 | 40.0 | 40.0 | 38.5 | 38.5 | 36.0 | 36.0 |
| DEX0477_033.nt.1 | 19535.0 | 39.3 | 39.3 | 30.0 | 30.0 | 46.2 | 46.2 | 32.0 | 32.0 |
| DEX0477_033.nt.1 | 19535.1 | 39.3 | 39.3 | 30.0 | 30.0 | 46.2 | 46.2 | 32.0 | 32.0 |
| DEX0477_033.nt.1 | 35174.0 | 39.3 | 39.3 | 50.0 | 50.0 | 46.2 | 46.2 | 40.0 | 40.0 |
| DEX0477_033.nt.1 | 35175.0 | 39.3 | 39.3 | 30.0 | 30.0 | 46.2 | 46.2 | 32.0 | 32.0 |
| DEX0477_033.nt.1 | 38703.0 | 35.7 | 35.7 | 40.0 | 40.0 | 46.2 | 46.2 | 32.0 | 32.0 |
| DEX0477_033.nt.1 | 38704.0 | 28.6 | 28.6 | 30.0 | 30.0 | 38.5 | 38.5 | 24.0 | 24.0 |
| DEX0477_033.nt.2 | 19534.0 | 35.7 | 35.7 | 40.0 | 40.0 | 38.5 | 38.5 | 36.0 | 36.0 |
| DEX0477_033.nt.2 | 19534.1 | 35.7 | 35.7 | 40.0 | 40.0 | 38.5 | 38.5 | 36.0 | 36.0 |
| DEX0477_033.nt.2 | 19535.0 | 39.3 | 39.3 | 30.0 | 30.0 | 46.2 | 46.2 | 32.0 | 32.0 |
| DEX0477_033.nt.2 | 19535.1 | 39.3 | 39.3 | 30.0 | 30.0 | 46.2 | 46.2 | 32.0 | 32.0 |
| DEX0477_033.nt.2 | 35174.0 | 39.3 | 39.3 | 50.0 | 50.0 | 46.2 | 46.2 | 40.0 | 40.0 |
| DEX0477_033.nt.2 | 35175.0 | 39.3 | 39.3 | 30.0 | 30.0 | 46.2 | 46.2 | 32.0 | 32.0 |
| DEX0477_033.nt.2 | 38703.0 | 35.7 | 35.7 | 40.0 | 40.0 | 46.2 | 46.2 | 32.0 | 32.0 |
| DEX0477_033.nt.2 | 38704.0 | 28.6 | 28.6 | 30.0 | 30.0 | 38.5 | 38.5 | 24.0 | 24.0 |
| DEX0477_033.nt.3 | 19534.0 | 35.7 | 35.7 | 40.0 | 40.0 | 38.5 | 38.5 | 36.0 | 36.0 |
| DEX0477_033.nt.3 | 19534.1 | 35.7 | 35.7 | 40.0 | 40.0 | 38.5 | 38.5 | 36.0 | 36.0 |
| DEX0477_033.nt.3 | 19535.0 | 39.3 | 39.3 | 30.0 | 30.0 | 46.2 | 46.2 | 32.0 | 32.0 |
| DEX0477_033.nt.3 | 19535.1 | 39.3 | 39.3 | 30.0 | 30.0 | 46.2 | 46.2 | 32.0 | 32.0 |
| DEX0477_033.nt.3 | 35174.0 | 39.3 | 39.3 | 50.0 | 50.0 | 46.2 | 46.2 | 40.0 | 40.0 |
| DEX0477_033.nt.3 | 35175.0 | 39.3 | 39.3 | 30.0 | 30.0 | 46.2 | 46.2 | 32.0 | 32.0 |
| DEX0477_033.nt.3 | 38703.0 | 35.7 | 35.7 | 40.0 | 40.0 | 46.2 | 46.2 | 32.0 | 32.0 |
| DEX0477_033.nt.3 | 38704.0 | 28.6 | 28.6 | 30.0 | 30.0 | 38.5 | 38.5 | 24.0 | 24.0 |
| DEX0477_035.nt.1 | 39948.0 | 21.4 | 21.4 | 10.0 | 10.0 | 23.1 | 23.1 | 16.0 | 16.0 |
| DEX0477_035.nt.2 | 39948.0 | 21.4 | 21.4 | 10.0 | 10.0 | 23.1 | 23.1 | 16.0 | 16.0 |
| DEX0477_035.nt.3 | 39948.0 | 21.4 | 21.4 | 10.0 | 10.0 | 23.1 | 23.1 | 16.0 | 16.0 |
| DEX0477_035.nt.4 | 39948.0 | 21.4 | 21.4 | 10.0 | 10.0 | 23.1 | 23.1 | 16.0 | 16.0 |
| DEX0477_037.nt.1 | 34940.0 | 17.9 | 17.9 | 40.0 | 40.0 | 46.2 | 46.2 | 12.0 | 12.0 |
| DEX0477_038.nt.1 | 10208.0 | 35.7 | 38.5 | 50.0 | 55.6 | 38.5 | 38.5 | 40.0 | 45.5 |
| DEX0477_038.nt.1 | 10209.0 | 39.3 | 40.7 | 40.0 | 40.0 | 30.8 | 30.8 | 44.0 | 45.8 |
| DEX0477_038.nt.2 | 10208.0 | 35.7 | 38.5 | 50.0 | 55.6 | 38.5 | 38.5 | 40.0 | 45.5 |
| DEX0477_038.nt.2 | 10209.0 | 39.3 | 40.7 | 40.0 | 40.0 | 30.8 | 30.8 | 44.0 | 45.8 |
| DEX0477_038.nt.3 | 10208.0 | 35.7 | 38.5 | 50.0 | 55.6 | 38.5 | 38.5 | 40.0 | 45.5 |
| DEX0477_038.nt.3 | 10209.0 | 39.3 | 40.7 | 40.0 | 40.0 | 30.8 | 30.8 | 44.0 | 45.8 |
| DEX0477_039.nt.1 | 38625.0 | 7.1 | 7.1 | 20.0 | 20.0 | 30.8 | 30.8 | 0.0 | 0.0 |
| DEX0477_039.nt.1 | 38628.0 | 28.6 | 28.6 | 30.0 | 30.0 | 38.5 | 38.5 | 24.0 | 24.0 |
| DEX0477_040.nt.1 | 10992.0 | 10.7 | 10.7 | 30.0 | 30.0 | 38.5 | 38.5 | 4.0 | 4.0 |
| DEX0477_040.nt.1 | 10993.0 | 7.1 | 7.1 | 30.0 | 30.0 | 30.8 | 30.8 | 4.0 | 4.0 |
| DEX0477_041.nt.1 | 28696.0 | 3.6 | 3.6 | 30.0 | 30.0 | 23.1 | 23.1 | 4.0 | 4.0 |
| DEX0477_059.nt.1 | 33732.0 | 64.3 | 69.2 | 40.0 | 44.4 | 30.8 | 33.3 | 72.0 | 78.3 |
| DEX0477_059.nt.1 | 33733.0 | 67.9 | 76.0 | 40.0 | 50.0 | 30.8 | 33.3 | 76.0 | 90.5 |
| DEX0477_059.nt.2 | 33732.0 | 64.3 | 69.2 | 40.0 | 44.4 | 30.8 | 33.3 | 72.0 | 78.3 |
| DEX0477_059.nt.2 | 33733.0 | 67.9 | 76.0 | 40.0 | 50.0 | 30.8 | 33.3 | 76.0 | 90.5 |
| DEX0477_060.nt.1 | 35080.0 | 57.1 | 59.3 | 60.0 | 60.0 | 46.2 | 50.0 | 64.0 | 64.0 |
| DEX0477_060.nt.1 | 35081.0 | 42.9 | 48.0 | 50.0 | 55.6 | 30.8 | 33.3 | 52.0 | 59.1 |
| DEX0477_060.nt.1 | 35760.0 | 17.9 | 17.9 | 0.0 | 0.0 | 23.1 | 23.1 | 8.0 | 8.3 |
| DEX0477_060.nt.1 | 35761.0 | 17.9 | 27.8 | 20.0 | 33.3 | 7.7 | 10.0 | 24.0 | 42.9 |
| DEX0477_060.nt.2 | 35080.0 | 57.1 | 59.3 | 60.0 | 60.0 | 46.2 | 50.0 | 64.0 | 64.0 |
| DEX0477_060.nt.2 | 35081.0 | 42.9 | 48.0 | 50.0 | 55.6 | 30.8 | 33.3 | 52.0 | 59.1 |
| DEX0477_060.nt.2 | 35760.0 | 17.9 | 17.9 | 0.0 | 0.0 | 23.1 | 23.1 | 8.0 | 8.3 |
| DEX0477_060.nt.2 | 35761.0 | 17.9 | 27.8 | 20.0 | 33.3 | 7.7 | 10.0 | 24.0 | 42.9 |
| DEX0477_062.nt.1 | 28401.0 | 7.1 | 7.1 | 30.0 | 30.0 | 30.8 | 30.8 | 4.0 | 4.0 |
| DEX0477_062.nt.1 | 28402.0 | 14.3 | 14.3 | 40.0 | 40.0 | 30.8 | 30.8 | 16.0 | 16.0 |
| DEX0477_063.nt.1 | 28637.0 | 71.4 | 71.4 | 80.0 | 80.0 | 69.2 | 69.2 | 76.0 | 76.0 |
| DEX0477_063.nt.1 | 28638.0 | 64.3 | 64.3 | 70.0 | 70.0 | 61.5 | 61.5 | 68.0 | 68.0 |
| DEX0477_063.nt.2 | 28637.0 | 71.4 | 71.4 | 80.0 | 80.0 | 69.2 | 69.2 | 76.0 | 76.0 |
| DEX0477_063.nt.2 | 28638.0 | 64.3 | 64.3 | 70.0 | 70.0 | 61.5 | 61.5 | 68.0 | 68.0 |
| DEX0477_064.nt.1 | 35559.0 | 32.1 | 33.3 | 50.0 | 55.6 | 23.1 | 27.3 | 44.0 | 44.0 |
| DEX0477_067.nt.1 | 36348.0 | 57.1 | 57.1 | 40.0 | 44.4 | 38.5 | 41.7 | 60.0 | 60.0 |
| DEX0477_069.nt.1 | 34086.0 | 0.0 | 0.0 | 10.0 | 11.1 | 7.7 | 9.1 | 0.0 | 0.0 |
| DEX0477_073.nt.1 | 33760.0 | 39.3 | 40.7 | 70.0 | 70.0 | 53.8 | 53.8 | 44.0 | 45.8 |
| DEX0477_073.nt.2 | 33760.0 | 39.3 | 40.7 | 70.0 | 70.0 | 53.8 | 53.8 | 44.0 | 45.8 |
| DEX0477_074.nt.1 | 33760.0 | 39.3 | 40.7 | 70.0 | 70.0 | 53.8 | 53.8 | 44.0 | 45.8 |
| DEX0477_075.nt.1 | 30637.0 | 82.1 | 82.1 | 80.0 | 88.9 | 69.2 | 75.0 | 88.0 | 88.0 |
| DEX0477_075.nt.1 | 30638.0 | 78.6 | 78.6 | 80.0 | 88.9 | 61.5 | 66.7 | 88.0 | 88.0 |
| DEX0477_077.nt.1 | 34002.0 | 60.7 | 60.7 | 60.0 | 60.0 | 53.8 | 53.8 | 64.0 | 64.0 |
| DEX0477_077.nt.1 | 34003.0 | 67.9 | 67.9 | 60.0 | 60.0 | 53.8 | 53.8 | 72.0 | 72.0 |
| DEX0477_077.nt.1 | 38323.0 | 53.6 | 55.6 | 40.0 | 40.0 | 53.8 | 53.8 | 48.0 | 50.0 |
| DEX0477_077.nt.1 | 38324.0 | 57.1 | 59.3 | 60.0 | 60.0 | 53.8 | 53.8 | 60.0 | 62.5 |
| DEX0477_078.nt.1 | 8312.0 | 3.6 | 3.7 | 0.0 | 0.0 | 0.0 | 0.0 | 4.0 | 4.3 |
| DEX0477_078.nt.1 | 8313.0 | 25.0 | 26.9 | 20.0 | 22.2 | 7.7 | 8.3 | 32.0 | 34.8 |
| DEX0477_079.nt.1 | 10992.0 | 10.7 | 10.7 | 30.0 | 30.0 | 38.5 | 38.5 | 4.0 | 4.0 |
| DEX0477_079.nt.1 | 10993.0 | 7.1 | 7.1 | 30.0 | 30.0 | 30.8 | 30.8 | 4.0 | 4.0 |

[0583] TABLE 10

| | | | | | Cln Cell |
|---|---|---|---|---|---|
| | | Cln Cell | Cln Cell | Cln Cell | Lines PMT |
| | Oligo | Lines % up | Lines % valid | Lines PMT | 550 % valid |
| DEX ID | Name | n = 5 | up n = 5 | 550 % up n = 5 | up n = 5 |
| DEX0477_009.nt.1 | 36563.0 | 80.0 | 80.0 | 80.0 | 80.0 |
| DEX0477_009.nt.1 | 36564.0 | 80.0 | 80.0 | 80.0 | 80.0 |
| DEX0477_031.nt.1 | 38625.0 | 40.0 | 40.0 | 40.0 | 40.0 |
| DEX0477_031.nt.1 | 38628.0 | 60.0 | 60.0 | 60.0 | 60.0 |
| DEX0477_032.nt.1 | 41923.0 | 0.0 | 0.0 | 0.0 | 0.0 |
| DEX0477_032.nt.1 | 41924.0 | 0.0 | 0.0 | 0.0 | 0.0 |
| DEX0477_033.nt.1 | 19534.0 | 20.0 | 20.0 | 0.0 | 0.0 |
| DEX0477_033.nt.1 | 19534.1 | 40.0 | 40.0 | 20.0 | 20.0 |
| DEX0477_033.nt.1 | 19535.0 | 20.0 | 20.0 | 20.0 | 20.0 |
| DEX0477_033.nt.1 | 19535.1 | 20.0 | 20.0 | 20.0 | 20.0 |
| DEX0477_033.nt.1 | 35174.0 | 40.0 | 40.0 | 20.0 | 20.0 |
| DEX0477_033.nt.1 | 35175.0 | 20.0 | 20.0 | 20.0 | 20.0 |
| DEX0477_033.nt.1 | 38703.0 | 20.0 | 20.0 | 20.0 | 25.0 |
| DEX0477_033.nt.1 | 38704.0 | 0.0 | 0.0 | 0.0 | 0.0 |
| DEX0477_033.nt.2 | 19534.0 | 20.0 | 20.0 | 0.0 | 0.0 |
| DEX0477_033.nt.2 | 19534.1 | 40.0 | 40.0 | 20.0 | 20.0 |
| DEX0477_033.nt.2 | 19535.0 | 20.0 | 20.0 | 20.0 | 20.0 |
| DEX0477_033.nt.2 | 19535.1 | 20.0 | 20.0 | 20.0 | 20.0 |
| DEX0477_033.nt.2 | 35174.0 | 40.0 | 40.0 | 20.0 | 20.0 |
| DEX0477_033.nt.2 | 35175.0 | 20.0 | 20.0 | 20.0 | 20.0 |
| DEX0477_033.nt.2 | 38703.0 | 20.0 | 20.0 | 20.0 | 25.0 |
| DEX0477_033.nt.2 | 38704.0 | 0.0 | 0.0 | 0.0 | 0.0 |
| DEX0477_033.nt.3 | 19534.0 | 20.0 | 20.0 | 0.0 | 0.0 |
| DEX0477_033.nt.3 | 19534.1 | 40.0 | 40.0 | 20.0 | 20.0 |
| DEX0477_033.nt.3 | 19535.0 | 20.0 | 20.0 | 20.0 | 20.0 |
| DEX0477_033.nt.3 | 19535.1 | 20.0 | 20.0 | 20.0 | 20.0 |
| DEX0477_033.nt.3 | 35174.0 | 40.0 | 40.0 | 20.0 | 20.0 |
| DEX0477_035.nt.1 | 39948.0 | 40.0 | 40.0 | 40.0 | 40.0 |
| DEX0477_035.nt.2 | 39948.0 | 40.0 | 40.0 | 40.0 | 40.0 |
| DEX0477_035.nt.3 | 39948.0 | 40.0 | 40.0 | 40.0 | 40.0 |
| DEX0477_035.nt.4 | 39948.0 | 40.0 | 40.0 | 40.0 | 40.0 |
| DEX0477_037.nt.1 | 34940.0 | 40.0 | 40.0 | 40.0 | 40.0 |
| DEX0477_039.nt.1 | 38625.0 | 40.0 | 40.0 | 40.0 | 40.0 |
| DEX0477_039.nt.1 | 38628.0 | 60.0 | 60.0 | 60.0 | 60.0 |
| DEX0477_040.nt.1 | 10992.0 | 60.0 | 75.0 | 60.0 | 60.0 |
| DEX0477_040.nt.1 | 10993.0 | 40.0 | 50.0 | 60.0 | 60.0 |
| DEX0477_041.nt.1 | 28696.0 | 60.0 | 60.0 | 80.0 | 80.0 |
| DEX0477_059.nt.1 | 33732.0 | 60.0 | 75.0 | 20.0 | 50.0 |
| DEX0477_059.nt.1 | 33733.0 | 40.0 | 66.7 | 20.0 | 50.0 |
| DEX0477_059.nt.2 | 33732.0 | 60.0 | 75.0 | 20.0 | 50.0 |
| DEX0477_059.nt.2 | 33733.0 | 40.0 | 66.7 | 20.0 | 50.0 |
| DEX0477_060.nt.1 | 35080.0 | 20.0 | 33.3 | 20.0 | 33.3 |
| DEX0477_060.nt.2 | 35080.0 | 20.0 | 33.3 | 20.0 | 33.3 |
| DEX0477_062.nt.1 | 28402.0 | 40.0 | 40.0 | 40.0 | 40.0 |
| DEX0477_064.nt.1 | 35559.0 | 20.0 | 50.0 | 60.0 | 60.0 |
| DEX0477_079.nt.1 | 10992.0 | 60.0 | 75.0 | 60.0 | 60.0 |
| DEX0477_079.nt.1 | 10993.0 | 40.0 | 50.0 | 60.0 | 60.0 |

[0584] TABLE 11

| | | Cln | | | | | |
|---|---|---|---|---|---|---|---|
| | | Multi- | Cln | Cln | Cln | | Cln |
| | | Can | Multi- | Multi- | Multi- | Cln | Multi- |
| | | ALL | Can ALL | Can ASC | Can ASC | Multi- | Can RS |
| | Oligo | % up | % valid | % up | % valid | Can RS | % valid |
| DEX ID | Name | n = 27 | up n = 27 | n = 14 | up n = 14 | % up n = 13 | up n = 13 |
| DEX0477_001.nt.1 | 78855.0 | 66.7 | 66.7 | 57.1 | 57.1 | 76.9 | 76.9 |
| DEX0477_001.nt.1 | 78855.1 | 66.7 | 66.7 | 57.1 | 57.1 | 76.9 | 76.9 |
| DEX0477_001.nt.1 | 78856.0 | 66.7 | 69.2 | 57.1 | 61.5 | 76.9 | 76.9 |
| DEX0477_001.nt.1 | 78856.1 | 63.0 | 63.0 | 57.1 | 57.1 | 69.2 | 69.2 |
| DEX0477_001.nt.2 | 27921.0 | 29.6 | 29.6 | 28.6 | 28.6 | 30.8 | 30.8 |
| DEX0477_001.nt.2 | 27921.1 | 29.6 | 29.6 | 28.6 | 28.6 | 30.8 | 30.8 |
| DEX0477_001.nt.2 | 27922.0 | 18.5 | 18.5 | 21.4 | 21.4 | 15.4 | 15.4 |
| DEX0477_001.nt.2 | 27922.1 | 29.6 | 29.6 | 28.6 | 28.6 | 30.8 | 30.8 |
| DEX0477_001.nt.2 | 78855.0 | 66.7 | 66.7 | 57.1 | 57.1 | 76.9 | 76.9 |
| DEX0477_001.nt.2 | 78855.1 | 66.7 | 66.7 | 57.1 | 57.1 | 76.9 | 76.9 |
| DEX0477_001.nt.2 | 78856.0 | 66.7 | 69.2 | 57.1 | 61.5 | 76.9 | 76.9 |
| DEX0477_001.nt.2 | 78856.1 | 63.0 | 63.0 | 57.1 | 57.1 | 69.2 | 69.2 |
| DEX0477_001.nt.4 | 27921.0 | 29.6 | 29.6 | 28.6 | 28.6 | 30.8 | 30.8 |
| DEX0477_001.nt.4 | 27921.1 | 29.6 | 29.6 | 28.6 | 28.6 | 30.8 | 30.8 |
| DEX0477_001.nt.4 | 27922.0 | 18.5 | 18.5 | 21.4 | 21.4 | 15.4 | 15.4 |
| DEX0477_001.nt.4 | 27922.1 | 29.6 | 29.6 | 28.6 | 28.6 | 30.8 | 30.8 |
| DEX0477_001.nt.4 | 78855.0 | 66.7 | 66.7 | 57.1 | 57.1 | 76.9 | 76.9 |
| DEX0477_001.nt.4 | 78855.1 | 66.7 | 66.7 | 57.1 | 57.1 | 76.9 | 76.9 |
| DEX0477_001.nt.4 | 78856.0 | 66.7 | 69.2 | 57.1 | 61.5 | 76.9 | 76.9 |
| DEX0477_001.nt.4 | 78856.1 | 63.0 | 63.0 | 57.1 | 57.1 | 69.2 | 69.2 |
| DEX0477_001.nt.5 | 27921.0 | 29.6 | 29.6 | 28.6 | 28.6 | 30.8 | 30.8 |
| DEX0477_001.nt.5 | 27921.1 | 29.6 | 29.6 | 28.6 | 28.6 | 30.8 | 30.8 |
| DEX0477_001.nt.5 | 27922.0 | 18.5 | 18.5 | 21.4 | 21.4 | 15.4 | 15.4 |
| DEX0477_001.nt.5 | 27922.1 | 29.6 | 29.6 | 28.6 | 28.6 | 30.8 | 30.8 |
| DEX0477_001.nt.5 | 78855.0 | 66.7 | 66.7 | 57.1 | 57.1 | 76.9 | 76.9 |
| DEX0477_001.nt.5 | 78855.1 | 66.7 | 66.7 | 57.1 | 57.1 | 76.9 | 76.9 |
| DEX0477_001.nt.5 | 78856.0 | 66.7 | 69.2 | 57.1 | 61.5 | 76.9 | 76.9 |
| DEX0477_001.nt.5 | 78856.1 | 63.0 | 63.0 | 57.1 | 57.1 | 69.2 | 69.2 |
| DEX0477_001.nt.6 | 27921.0 | 29.6 | 29.6 | 28.6 | 28.6 | 30.8 | 30.8 |
| DEX0477_001.nt.6 | 27921.1 | 29.6 | 29.6 | 28.6 | 28.6 | 30.8 | 30.8 |
| DEX0477_001.nt.6 | 27922.0 | 18.5 | 18.5 | 21.4 | 21.4 | 15.4 | 15.4 |
| DEX0477_001.nt.6 | 27922.1 | 29.6 | 29.6 | 28.6 | 28.6 | 30.8 | 30.8 |
| DEX0477_001.nt.6 | 78855.0 | 66.7 | 66.7 | 57.1 | 57.1 | 76.9 | 76.9 |
| DEX0477_001.nt.6 | 78855.1 | 66.7 | 66.7 | 57.1 | 57.1 | 76.9 | 76.9 |
| DEX0477_001.nt.6 | 78856.0 | 66.7 | 69.2 | 57.1 | 61.5 | 76.9 | 76.9 |
| DEX0477_001.nt.6 | 78856.1 | 63.0 | 63.0 | 57.1 | 57.1 | 69.2 | 69.2 |
| DEX0477_001.nt.7 | 27921.0 | 29.6 | 29.6 | 28.6 | 28.6 | 30.8 | 30.8 |
| DEX0477_001.nt.7 | 27921.1 | 29.6 | 29.6 | 28.6 | 28.6 | 30.8 | 30.8 |
| DEX0477_001.nt.7 | 78855.0 | 66.7 | 66.7 | 57.1 | 57.1 | 76.9 | 76.9 |
| DEX0477_001.nt.7 | 78855.1 | 66.7 | 66.7 | 57.1 | 57.1 | 76.9 | 76.9 |
| DEX0477_001.nt.7 | 78856.0 | 66.7 | 69.2 | 57.1 | 61.5 | 76.9 | 76.9 |
| DEX0477_001.nt.7 | 78856.1 | 63.0 | 63.0 | 57.1 | 57.1 | 69.2 | 69.2 |
| DEX0477_001.nt.8 | 27921.0 | 29.6 | 29.6 | 28.6 | 28.6 | 30.8 | 30.8 |
| DEX0477_001.nt.8 | 27921.1 | 29.6 | 29.6 | 28.6 | 28.6 | 30.8 | 30.8 |
| DEX0477_001.nt.8 | 27922.0 | 18.5 | 18.5 | 21.4 | 21.4 | 15.4 | 15.4 |
| DEX0477_001.nt.8 | 27922.1 | 29.6 | 29.6 | 28.6 | 28.6 | 30.8 | 30.8 |
| DEX0477_001.nt.8 | 78855.0 | 66.7 | 66.7 | 57.1 | 57.1 | 76.9 | 76.9 |
| DEX0477_001.nt.8 | 78855.1 | 66.7 | 66.7 | 57.1 | 57.1 | 76.9 | 76.9 |
| DEX0477_001.nt.8 | 78856.0 | 66.7 | 69.2 | 57.1 | 61.5 | 76.9 | 76.9 |
| DEX0477_001.nt.8 | 78856.1 | 63.0 | 63.0 | 57.1 | 57.1 | 69.2 | 69.2 |
| DEX0477_001.nt.9 | 27921.0 | 29.6 | 29.6 | 28.6 | 28.6 | 30.8 | 30.8 |
| DEX0477_001.nt.9 | 27921.1 | 29.6 | 29.6 | 28.6 | 28.6 | 30.8 | 30.8 |
| DEX0477_001.nt.9 | 27922.0 | 18.5 | 18.5 | 21.4 | 21.4 | 15.4 | 15.4 |
| DEX0477_001.nt.9 | 27922.1 | 29.6 | 29.6 | 28.6 | 28.6 | 30.8 | 30.8 |
| DEX0477_001.nt.9 | 78855.0 | 66.7 | 66.7 | 57.1 | 57.1 | 76.9 | 76.9 |
| DEX0477_001.nt.9 | 78855.1 | 66.7 | 66.7 | 57.1 | 57.1 | 76.9 | 76.9 |
| DEX0477_001.nt.9 | 78856.0 | 66.7 | 69.2 | 57.1 | 61.5 | 76.9 | 76.9 |
| DEX0477_001.nt.9 | 78856.1 | 63.0 | 63.0 | 57.1 | 57.1 | 69.2 | 69.2 |
| DEX0477_002.nt.1 | 27921.0 | 29.6 | 29.6 | 28.6 | 28.6 | 30.8 | 30.8 |
| DEX0477_002.nt.1 | 27921.1 | 29.6 | 29.6 | 28.6 | 28.6 | 30.8 | 30.8 |
| DEX0477_002.nt.1 | 27922.0 | 18.5 | 18.5 | 21.4 | 21.4 | 15.4 | 15.4 |
| DEX0477_002.nt.1 | 27922.1 | 29.6 | 29.6 | 28.6 | 28.6 | 30.8 | 30.8 |
| DEX0477_002.nt.1 | 78855.0 | 66.7 | 66.7 | 57.1 | 57.1 | 76.9 | 76.9 |
| DEX0477_002.nt.1 | 78855.1 | 66.7 | 66.7 | 57.1 | 57.1 | 76.9 | 76.9 |
| DEX0477_002.nt.1 | 78856.0 | 66.7 | 69.2 | 57.1 | 61.5 | 76.9 | 76.9 |
| DEX0477_002.nt.1 | 78856.1 | 63.0 | 63.0 | 57.1 | 57.1 | 69.2 | 69.2 |
| DEX0477_002.nt.2 | 27921.0 | 29.6 | 29.6 | 28.6 | 28.6 | 30.8 | 30.8 |
| DEX0477_002.nt.2 | 27921.1 | 29.6 | 29.6 | 28.6 | 28.6 | 30.8 | 30.8 |
| DEX0477_002.nt.2 | 27922.0 | 18.5 | 18.5 | 21.4 | 21.4 | 15.4 | 15.4 |
| DEX0477_002.nt.2 | 27922.1 | 29.6 | 29.6 | 28.6 | 28.6 | 30.8 | 30.8 |
| DEX0477_002.nt.2 | 78855.0 | 66.7 | 66.7 | 57.1 | 57.1 | 76.9 | 76.9 |
| DEX0477_002.nt.2 | 78855.1 | 66.7 | 66.7 | 57.1 | 57.1 | 76.9 | 76.9 |
| DEX0477_002.nt.2 | 78856.0 | 66.7 | 69.2 | 57.1 | 61.5 | 76.9 | 76.9 |
| DEX0477_002.nt.2 | 78856.1 | 63.0 | 63.0 | 57.1 | 57.1 | 69.2 | 69.2 |
| DEX0477_003.nt.1 | 96120.0 | 22.2 | 23.1 | 28.6 | 30.8 | 15.4 | 15.4 |
| DEX0477_003.nt.1 | 96120.1 | 29.6 | 29.6 | 28.6 | 28.6 | 30.8 | 30.8 |
| DEX0477_003.nt.1 | 105624.0 | 25.9 | 26.9 | 28.6 | 30.8 | 23.1 | 23.1 |
| DEX0477_003.nt.1 | 105628.0 | 29.6 | 29.6 | 28.6 | 28.6 | 30.8 | 30.8 |
| DEX0477_003.nt.1 | 105628.1 | 29.6 | 30.8 | 28.6 | 28.6 | 30.8 | 33.3 |
| DEX0477_003.nt.2 | 96120.0 | 22.2 | 23.1 | 28.6 | 30.8 | 15.4 | 15.4 |
| DEX0477_003.nt.2 | 96120.1 | 29.6 | 29.6 | 28.6 | 28.6 | 30.8 | 30.8 |
| DEX0477_003.nt.2 | 105624.0 | 25.9 | 26.9 | 28.6 | 30.8 | 23.1 | 23.1 |
| DEX0477_003.nt.2 | 105624.1 | 25.9 | 25.9 | 28.6 | 28.6 | 23.1 | 23.1 |
| DEX0477_003.nt.2 | 105627.0 | 0.0 | 0.0 | 0.0 | 0.0 | 0.0 | 0.0 |
| DEX0477_003.nt.2 | 105627.1 | 0.0 | 0.0 | 0.0 | 0.0 | 0.0 | 0.0 |
| DEX0477_003.nt.2 | 105628.0 | 29.6 | 29.6 | 28.6 | 28.6 | 30.8 | 30.8 |
| DEX0477_003.nt.2 | 105628.1 | 29.6 | 30.8 | 28.6 | 28.6 | 30.8 | 33.3 |
| DEX0477_004.nt.1 | 1200.0 | 74.1 | 74.1 | 85.7 | 85.7 | 61.5 | 61.5 |
| DEX0477_004.nt.1 | 1201.0 | 74.1 | 74.1 | 85.7 | 85.7 | 61.5 | 61.5 |
| DEX0477_006.nt.1 | 9744.0 | 14.8 | 15.4 | 14.3 | 15.4 | 15.4 | 15.4 |
| DEX0477_006.nt.1 | 9744.1 | 11.1 | 11.5 | 7.1 | 7.7 | 15.4 | 15.4 |
| DEX0477_006.nt.1 | 9745.0 | 22.2 | 22.2 | 14.3 | 14.3 | 30.8 | 30.8 |
| DEX0477_006.nt.1 | 9745.1 | 18.5 | 19.2 | 14.3 | 15.4 | 23.1 | 23.1 |
| DEX0477_007.nt.1 | 17852.0 | 81.5 | 81.5 | 85.7 | 85.7 | 76.9 | 76.9 |
| DEX0477_007.nt.1 | 17852.1 | 81.5 | 81.5 | 85.7 | 85.7 | 76.9 | 76.9 |
| DEX0477_007.nt.1 | 17853.0 | 85.2 | 85.2 | 92.9 | 92.9 | 76.9 | 76.9 |
| DEX0477_007.nt.1 | 17853.1 | 85.2 | 85.2 | 92.9 | 92.9 | 76.9 | 76.9 |
| DEX0477_007.nt.1 | 18644.0 | 77.8 | 77.8 | 85.7 | 85.7 | 69.2 | 69.2 |
| DEX0477_007.nt.1 | 18644.1 | 81.5 | 81.5 | 92.9 | 92.9 | 69.2 | 69.2 |
| DEX0477_007.nt.1 | 18644.2 | 70.4 | 76.0 | 71.4 | 83.3 | 69.2 | 69.2 |
| DEX0477_007.nt.1 | 18644.3 | 81.5 | 81.5 | 85.7 | 85.7 | 76.9 | 76.9 |
| DEX0477_007.nt.1 | 18645.0 | 85.2 | 85.2 | 92.9 | 92.9 | 76.9 | 76.9 |
| DEX0477_007.nt.1 | 18645.1 | 85.2 | 85.2 | 92.9 | 92.9 | 76.9 | 76.9 |
| DEX0477_007.nt.1 | 18645.2 | 85.2 | 85.2 | 92.9 | 92.9 | 76.9 | 76.9 |
| DEX0477_007.nt.1 | 18645.3 | 85.2 | 85.2 | 92.9 | 92.9 | 76.9 | 76.9 |
| DEX0477_008.nt.1 | 4733.0 | 74.1 | 74.1 | 64.3 | 64.3 | 84.6 | 84.6 |
| DEX0477_008.nt.1 | 4733.1 | 70.4 | 70.4 | 57.1 | 57.1 | 84.6 | 84.6 |
| DEX0477_008.nt.1 | 4734.0 | 70.4 | 70.4 | 57.1 | 57.1 | 84.6 | 84.6 |
| DEX0477_008.nt.1 | 4734.1 | 66.7 | 69.2 | 57.1 | 57.1 | 76.9 | 83.3 |
| DEX0477_009.nt.1 | 990.0 | 63.0 | 63.0 | 71.4 | 71.4 | 53.8 | 53.8 |
| DEX0477_014.nt.1 | 4538.0 | 7.4 | 100.0 | 0.0 | 0.0 | 15.4 | 100.0 |
| DEX0477_014.nt.1 | 4538.1 | 11.1 | 100.0 | 7.1 | 100.0 | 15.4 | 100.0 |
| DEX0477_014.nt.1 | 27949.0 | 7.4 | 100.0 | 7.1 | 100.0 | 7.7 | 100.0 |
| DEX0477_014.nt.1 | 27949.1 | 7.4 | 100.0 | 7.1 | 100.0 | 7.7 | 100.0 |
| DEX0477_014.nt.2 | 4538.0 | 7.4 | 100.0 | 0.0 | 0.0 | 15.4 | 100.0 |
| DEX0477_014.nt.2 | 4538.1 | 11.1 | 100.0 | 7.1 | 100.0 | 15.4 | 100.0 |
| DEX0477_014.nt.2 | 27949.0 | 7.4 | 100.0 | 7.1 | 100.0 | 7.7 | 100.0 |
| DEX0477_014.nt.2 | 27949.1 | 7.4 | 100.0 | 7.1 | 100.0 | 7.7 | 100.0 |
| DEX0477_014.nt.3 | 4538.0 | 7.4 | 100.0 | 0.0 | 0.0 | 15.4 | 100.0 |
| DEX0477_014.nt.3 | 4538.1 | 11.1 | 100.0 | 7.1 | 100.0 | 15.4 | 100.0 |
| DEX0477_014.nt.3 | 27949.0 | 7.4 | 100.0 | 7.1 | 100.0 | 7.7 | 100.0 |
| DEX0477_014.nt.3 | 27949.1 | 7.4 | 100.0 | 7.1 | 100.0 | 7.7 | 100.0 |
| DEX0477_030.nt.1 | 28117.0 | 51.9 | 70.0 | 71.4 | 76.9 | 30.8 | 57.1 |
| DEX0477_030.nt.1 | 28117.1 | 55.6 | 68.2 | 78.6 | 84.6 | 30.8 | 44.4 |
| DEX0477_030.nt.1 | 28118.0 | 48.1 | 81.2 | 64.3 | 81.8 | 30.8 | 80.0 |
| DEX0477_030.nt.1 | 28118.1 | 51.9 | 82.4 | 71.4 | 83.3 | 30.8 | 80.0 |
| DEX0477_030.nt.2 | 28117.0 | 51.9 | 70.0 | 71.4 | 76.9 | 30.8 | 57.1 |
| DEX0477_030.nt.2 | 28117.1 | 55.6 | 68.2 | 78.6 | 84.6 | 30.8 | 44.4 |
| DEX0477_030.nt.2 | 28118.0 | 48.1 | 81.2 | 64.3 | 81.8 | 30.8 | 80.0 |
| DEX0477_030.nt.2 | 28118.1 | 51.9 | 82.4 | 71.4 | 83.3 | 30.8 | 80.0 |
| DEX0477_030.nt.3 | 28117.0 | 51.9 | 70.0 | 71.4 | 76.9 | 30.8 | 57.1 |
| DEX0477_030.nt.3 | 28117.1 | 55.6 | 68.2 | 78.6 | 84.6 | 30.8 | 44.4 |
| DEX0477_030.nt.3 | 28118.0 | 48.1 | 81.2 | 64.3 | 81.8 | 30.8 | 80.0 |
| DEX0477_030.nt.3 | 28118.1 | 51.9 | 82.4 | 71.4 | 83.3 | 30.8 | 80.0 |
| DEX0477_031.nt.1 | 38628.0 | 29.6 | 29.6 | 35.7 | 35.7 | 23.1 | 23.1 |
| DEX0477_031.nt.1 | 38628.1 | 25.9 | 25.9 | 28.6 | 28.6 | 23.1 | 23.1 |
| DEX0477_033.nt.1 | 19534.0 | 33.3 | 33.3 | 35.7 | 35.7 | 30.8 | 30.8 |
| DEX0477_033.nt.1 | 19534.1 | 33.3 | 33.3 | 35.7 | 35.7 | 30.8 | 30.8 |
| DEX0477_033.nt.1 | 19535.0 | 29.6 | 29.6 | 28.6 | 28.6 | 30.8 | 30.8 |
| DEX0477_033.nt.1 | 19535.1 | 33.3 | 33.3 | 35.7 | 35.7 | 30.8 | 30.8 |
| DEX0477_033.nt.1 | 41957.0 | 33.3 | 33.3 | 35.7 | 35.7 | 30.8 | 30.8 |
| DEX0477_033.nt.1 | 41957.1 | 33.3 | 33.3 | 35.7 | 35.7 | 30.8 | 30.8 |
| DEX0477_033.nt.1 | 41957.2 | 33.3 | 33.3 | 35.7 | 35.7 | 30.8 | 30.8 |
| DEX0477_033.nt.1 | 41958.0 | 37.0 | 37.0 | 35.7 | 35.7 | 38.5 | 38.5 |
| DEX0477_033.nt.1 | 41958.1 | 33.3 | 33.3 | 35.7 | 35.7 | 30.8 | 30.8 |
| DEX0477_033.nt.1 | 41958.2 | 33.3 | 33.3 | 35.7 | 35.7 | 30.8 | 30.8 |
| DEX0477_033.nt.2 | 19534.0 | 33.3 | 33.3 | 35.7 | 35.7 | 30.8 | 30.8 |
| DEX0477_033.nt.2 | 19534.1 | 33.3 | 33.3 | 35.7 | 35.7 | 30.8 | 30.8 |
| DEX0477_033.nt.2 | 19535.0 | 29.6 | 29.6 | 28.6 | 28.6 | 30.8 | 30.8 |
| DEX0477_033.nt.2 | 19535.1 | 33.3 | 33.3 | 35.7 | 35.7 | 30.8 | 30.8 |
| DEX0477_033.nt.2 | 41957.0 | 33.3 | 33.3 | 35.7 | 35.7 | 30.8 | 30.8 |
| DEX0477_033.nt.2 | 41957.1 | 33.3 | 33.3 | 35.7 | 35.7 | 30.8 | 30.8 |
| DEX0477_033.nt.2 | 41957.2 | 33.3 | 33.3 | 35.7 | 35.7 | 30.8 | 30.8 |
| DEX0477_033.nt.2 | 41958.0 | 37.0 | 37.0 | 35.7 | 35.7 | 38.5 | 38.5 |
| DEX0477_033.nt.2 | 41958.1 | 33.3 | 33.3 | 35.7 | 35.7 | 30.8 | 30.8 |
| DEX0477_033.nt.2 | 41958.2 | 33.3 | 33.3 | 35.7 | 35.7 | 30.8 | 30.8 |
| DEX0477_033.nt.3 | 19534.0 | 33.3 | 33.3 | 35.7 | 35.7 | 30.8 | 30.8 |
| DEX0477_033.nt.3 | 19534.1 | 33.3 | 33.3 | 35.7 | 35.7 | 30.8 | 30.8 |
| DEX0477_033.nt.3 | 19535.0 | 29.6 | 29.6 | 28.6 | 28.6 | 30.8 | 30.8 |
| DEX0477_033.nt.3 | 19535.1 | 33.3 | 33.3 | 35.7 | 35.7 | 30.8 | 30.8 |
| DEX0477_033.nt.3 | 41957.0 | 33.3 | 33.3 | 35.7 | 35.7 | 30.8 | 30.8 |
| DEX0477_033.nt.3 | 41957.1 | 33.3 | 33.3 | 35.7 | 35.7 | 30.8 | 30.8 |
| DEX0477_033.nt.3 | 41957.2 | 33.3 | 33.3 | 35.7 | 35.7 | 30.8 | 30.8 |
| DEX0477_033.nt.3 | 41958.0 | 37.0 | 37.0 | 35.7 | 35.7 | 38.5 | 38.5 |
| DEX0477_033.nt.3 | 41958.1 | 33.3 | 33.3 | 35.7 | 35.7 | 30.8 | 30.8 |
| DEX0477_033.nt.3 | 41958.2 | 33.3 | 33.3 | 35.7 | 35.7 | 30.8 | 30.8 |
| DEX0477_034.nt.1 | 3933.0 | 29.6 | 30.8 | 28.6 | 30.8 | 30.8 | 30.8 |
| DEX0477_035.nt.1 | 973.0 | 22.2 | 22.2 | 28.6 | 28.6 | 15.4 | 15.4 |
| DEX0477_035.nt.1 | 996.0 | 55.6 | 57.7 | 64.3 | 69.2 | 46.2 | 46.2 |
| DEX0477_035.nt.2 | 973.0 | 22.2 | 22.2 | 28.6 | 28.6 | 15.4 | 15.4 |
| DEX0477_035.nt.3 | 973.0 | 22.2 | 22.2 | 28.6 | 28.6 | 15.4 | 15.4 |
| DEX0477_035.nt.4 | 973.0 | 22.2 | 22.2 | 28.6 | 28.6 | 15.4 | 15.4 |
| DEX0477_035.nt.4 | 996.0 | 55.6 | 57.7 | 64.3 | 69.2 | 46.2 | 46.2 |
| DEX0477_035.nt.5 | 996.0 | 55.6 | 57.7 | 64.3 | 69.2 | 46.2 | 46.2 |
| DEX0477_036.nt.1 | 2371.0 | 48.1 | 48.1 | 50.0 | 50.0 | 46.2 | 46.2 |
| DEX0477_036.nt.1 | 2406.0 | 33.3 | 33.3 | 28.6 | 28.6 | 38.5 | 38.5 |
| DEX0477_036.nt.1 | 2442.0 | 37.0 | 37.0 | 28.6 | 28.6 | 46.2 | 46.2 |
| DEX0477_036.nt.1 | 3111.0 | 55.6 | 68.2 | 42.9 | 54.5 | 69.2 | 81.8 |
| DEX0477_039.nt.1 | 23480.0 | 11.1 | 11.5 | 21.4 | 23.1 | 0.0 | 0.0 |
| DEX0477_039.nt.1 | 23480.1 | 18.5 | 18.5 | 28.6 | 28.6 | 7.7 | 7.7 |
| DEX0477_039.nt.1 | 23481.0 | 25.9 | 25.9 | 35.7 | 35.7 | 15.4 | 15.4 |
| DEX0477_039.nt.1 | 23481.1 | 22.2 | 23.1 | 21.4 | 23.1 | 23.1 | 23.1 |
| DEX0477_039.nt.1 | 38627.0 | 22.2 | 22.2 | 21.4 | 21.4 | 23.1 | 23.1 |
| DEX0477_039.nt.1 | 38627.1 | 14.8 | 14.8 | 21.4 | 21.4 | 7.7 | 7.7 |
| DEX0477_039.nt.1 | 38628.0 | 29.6 | 29.6 | 35.7 | 35.7 | 23.1 | 23.1 |
| DEX0477_039.nt.1 | 38628.1 | 25.9 | 25.9 | 28.6 | 28.6 | 23.1 | 23.1 |
| DEX0477_042.nt.1 | 3383.0 | 51.9 | 51.9 | 42.9 | 42.9 | 61.5 | 61.5 |
| DEX0477_061.nt.1 | 36404.0 | 29.6 | 29.6 | 42.9 | 42.9 | 15.4 | 15.4 |
| DEX0477_061.nt.1 | 36404.1 | 25.9 | 25.9 | 42.9 | 42.9 | 7.7 | 7.7 |
| DEX0477_061.nt.2 | 36403.0 | 14.8 | 14.8 | 21.4 | 21.4 | 7.7 | 7.7 |
| DEX0477_061.nt.2 | 36403.1 | 7.4 | 7.4 | 14.3 | 14.3 | 0.0 | 0.0 |
| DEX0477_061.nt.2 | 36404.0 | 29.6 | 29.6 | 42.9 | 42.9 | 15.4 | 15.4 |
| DEX0477_061.nt.2 | 36404.1 | 25.9 | 25.9 | 42.9 | 42.9 | 7.7 | 7.7 |
| DEX0477_065.nt.1 | 4941.0 | 33.3 | 33.3 | 28.6 | 28.6 | 38.5 | 38.5 |
| DEX0477_065.nt.2 | 4941.0 | 33.3 | 33.3 | 28.6 | 28.6 | 38.5 | 38.5 |
| DEX0477_065.nt.3 | 4941.0 | 33.3 | 33.3 | 28.6 | 28.6 | 38.5 | 38.5 |
| DEX0477_066.nt.1 | 4941.0 | 33.3 | 33.3 | 28.6 | 28.6 | 38.5 | 38.5 |
| DEX0477_066.nt.2 | 4941.0 | 33.3 | 33.3 | 28.6 | 28.6 | 38.5 | 38.5 |
| DEX0477_068.nt.1 | 5539.0 | 14.8 | 14.8 | 7.1 | 7.1 | 23.1 | 23.1 |
| DEX0477_070.nt.1 | 3745.0 | 33.3 | 33.3 | 28.6 | 28.6 | 38.5 | 38.5 |
| DEX0477_076.nt.1 | 1383.0 | 18.5 | 18.5 | 28.6 | 28.6 | 7.7 | 7.7 |

[0585] TABLE 12

| | | Cln | | | | | |
|---|---|---|---|---|---|---|---|
| | | Multi- | Cln | | Cln | | Cln |
| | | Can | Multi- | Cln | Multi- | Cln | Multi- |
| | | 550 | Can 550 | Multi- | Can 550 | Multi- | Can 550 |
| | | ALL | ALL | Can 550 | ASC | Can 550 | RS |
| | Oligo | % up | % valid | ASC % up | % valid | RS % up | % valid |
| DEX ID | Name | n = 27 | up n = 27 | n = 14 | up n = 14 | n = 13 | up n = 13 |
| DEX0477_001.nt.1 | 78855.0 | 63.0 | 63.0 | 50.0 | 50.0 | 76.9 | 76.9 |
| DEX0477_001.nt.1 | 78855.1 | 63.0 | 63.0 | 50.0 | 50.0 | 76.9 | 76.9 |
| DEX0477_001.nt.1 | 78856.0 | 63.0 | 65.4 | 50.0 | 53.8 | 76.9 | 76.9 |
| DEX0477_001.nt.1 | 78856.1 | 63.0 | 63.0 | 57.1 | 57.1 | 69.2 | 69.2 |
| DEX0477_001.nt.2 | 27921.0 | 25.9 | 25.9 | 28.6 | 28.6 | 23.1 | 23.1 |
| DEX0477_001.nt.2 | 27921.1 | 22.2 | 23.1 | 21.4 | 23.1 | 23.1 | 23.1 |
| DEX0477_001.nt.2 | 27922.0 | 18.5 | 18.5 | 21.4 | 21.4 | 15.4 | 15.4 |
| DEX0477_001.nt.2 | 27922.1 | 25.9 | 25.9 | 28.6 | 28.6 | 23.1 | 23.1 |
| DEX0477_001.nt.2 | 78855.0 | 63.0 | 63.0 | 50.0 | 50.0 | 76.9 | 76.9 |
| DEX0477_001.nt.2 | 78855.1 | 63.0 | 63.0 | 50.0 | 50.0 | 76.9 | 76.9 |
| DEX0477_001.nt.2 | 78856.0 | 63.0 | 65.4 | 50.0 | 53.8 | 76.9 | 76.9 |
| DEX0477_001.nt.2 | 78856.1 | 63.0 | 63.0 | 57.1 | 57.1 | 69.2 | 69.2 |
| DEX0477_001.nt.4 | 27921.0 | 25.9 | 25.9 | 28.6 | 28.6 | 23.1 | 23.1 |
| DEX0477_001.nt.4 | 27921.1 | 22.2 | 23.1 | 21.4 | 23.1 | 23.1 | 23.1 |
| DEX0477_001.nt.4 | 27922.0 | 18.5 | 18.5 | 21.4 | 21.4 | 15.4 | 15.4 |
| DEX0477_001.nt.4 | 27922.1 | 25.9 | 25.9 | 28.6 | 28.6 | 23.1 | 23.1 |
| DEX0477_001.nt.4 | 78855.0 | 63.0 | 63.0 | 50.0 | 50.0 | 76.9 | 76.9 |
| DEX0477_001.nt.4 | 78855.1 | 63.0 | 63.0 | 50.0 | 50.0 | 76.9 | 76.9 |
| DEX0477_001.nt.4 | 78856.0 | 63.0 | 65.4 | 50.0 | 53.8 | 76.9 | 76.9 |
| DEX0477_001.nt.4 | 78856.1 | 63.0 | 63.0 | 57.1 | 57.1 | 69.2 | 69.2 |
| DEX0477_001.nt.5 | 78855.0 | 63.0 | 63.0 | 50.0 | 50.0 | 76.9 | 76.9 |
| DEX0477_001.nt.5 | 78855.1 | 63.0 | 63.0 | 50.0 | 50.0 | 76.9 | 76.9 |
| DEX0477_001.nt.5 | 78856.0 | 63.0 | 65.4 | 50.0 | 53.8 | 76.9 | 76.9 |
| DEX0477_001.nt.5 | 78856.1 | 63.0 | 63.0 | 57.1 | 57.1 | 69.2 | 69.2 |
| DEX0477_001.nt.6 | 78855.0 | 63.0 | 63.0 | 50.0 | 50.0 | 76.9 | 76.9 |
| DEX0477_001.nt.6 | 78855.1 | 63.0 | 63.0 | 50.0 | 50.0 | 76.9 | 76.9 |
| DEX0477_001.nt.6 | 78856.0 | 63.0 | 65.4 | 50.0 | 53.8 | 76.9 | 76.9 |
| DEX0477_001.nt.6 | 78856.1 | 63.0 | 63.0 | 57.1 | 57.1 | 69.2 | 69.2 |
| DEX0477_001.nt.7 | 78855.0 | 63.0 | 63.0 | 50.0 | 50.0 | 76.9 | 76.9 |
| DEX0477_001.nt.7 | 78855.1 | 63.0 | 63.0 | 50.0 | 50.0 | 76.9 | 76.9 |
| DEX0477_001.nt.7 | 78856.0 | 63.0 | 65.4 | 50.0 | 53.8 | 76.9 | 76.9 |
| DEX0477_001.nt.7 | 78856.1 | 63.0 | 63.0 | 57.1 | 57.1 | 69.2 | 69.2 |
| DEX0477_001.nt.8 | 78855.0 | 63.0 | 63.0 | 50.0 | 50.0 | 76.9 | 76.9 |
| DEX0477_001.nt.8 | 78855.1 | 63.0 | 63.0 | 50.0 | 50.0 | 76.9 | 76.9 |
| DEX0477_001.nt.8 | 78856.0 | 63.0 | 65.4 | 50.0 | 53.8 | 76.9 | 76.9 |
| DEX0477_001.nt.8 | 78856.1 | 63.0 | 63.0 | 57.1 | 57.1 | 69.2 | 69.2 |
| DEX0477_001.nt.9 | 78855.0 | 63.0 | 63.0 | 50.0 | 50.0 | 76.9 | 76.9 |
| DEX0477_001.nt.9 | 78855.1 | 63.0 | 63.0 | 50.0 | 50.0 | 76.9 | 76.9 |
| DEX0477_001.nt.9 | 78856.0 | 63.0 | 65.4 | 50.0 | 53.8 | 76.9 | 76.9 |
| DEX0477_001.nt.9 | 78856.1 | 63.0 | 63.0 | 57.1 | 57.1 | 69.2 | 69.2 |
| DEX0477_002.nt.1 | 78855.0 | 63.0 | 63.0 | 50.0 | 50.0 | 76.9 | 76.9 |
| DEX0477_002.nt.1 | 78855.1 | 63.0 | 63.0 | 50.0 | 50.0 | 76.9 | 76.9 |
| DEX0477_002.nt.1 | 78856.0 | 63.0 | 65.4 | 50.0 | 53.8 | 76.9 | 76.9 |
| DEX0477_002.nt.1 | 78856.1 | 63.0 | 63.0 | 57.1 | 57.1 | 69.2 | 69.2 |
| DEX0477_002.nt.2 | 27921.0 | 25.9 | 25.9 | 28.6 | 28.6 | 23.1 | 23.1 |
| DEX0477_002.nt.2 | 27921.1 | 22.2 | 23.1 | 21.4 | 23.1 | 23.1 | 23.1 |
| DEX0477_002.nt.2 | 27922.0 | 18.5 | 18.5 | 21.4 | 21.4 | 15.4 | 15.4 |
| DEX0477_002.nt.2 | 27922.1 | 25.9 | 25.9 | 28.6 | 28.6 | 23.1 | 23.1 |
| DEX0477_002.nt.2 | 78855.0 | 63.0 | 63.0 | 50.0 | 50.0 | 76.9 | 76.9 |
| DEX0477_002.nt.2 | 78855.1 | 63.0 | 63.0 | 50.0 | 50.0 | 76.9 | 76.9 |
| DEX0477_002.nt.2 | 78856.0 | 63.0 | 65.4 | 50.0 | 53.8 | 76.9 | 76.9 |
| DEX0477_002.nt.2 | 78856.1 | 63.0 | 63.0 | 57.1 | 57.1 | 69.2 | 69.2 |
| DEX0477_003.nt.1 | 105624.0 | 22.2 | 23.1 | 28.6 | 30.8 | 15.4 | 15.4 |
| DEX0477_003.nt.1 | 105628.0 | 29.6 | 29.6 | 28.6 | 28.6 | 30.8 | 30.8 |
| DEX0477_003.nt.1 | 105628.1 | 29.6 | 30.8 | 28.6 | 28.6 | 30.8 | 33.3 |
| DEX0477_003.nt.2 | 105624.0 | 22.2 | 23.1 | 28.6 | 30.8 | 15.4 | 15.4 |
| DEX0477_003.nt.2 | 105624.1 | 25.9 | 25.9 | 28.6 | 28.6 | 23.1 | 23.1 |
| DEX0477_003.nt.2 | 105628.0 | 29.6 | 29.6 | 28.6 | 28.6 | 30.8 | 30.8 |
| DEX0477_003.nt.2 | 105628.1 | 29.6 | 30.8 | 28.6 | 28.6 | 30.8 | 33.3 |
| DEX0477_004.nt.1 | 1200.0 | 70.4 | 70.4 | 85.7 | 85.7 | 53.8 | 53.8 |
| DEX0477_004.nt.1 | 1201.0 | 74.1 | 74.1 | 85.7 | 85.7 | 61.5 | 61.5 |
| DEX0477_006.nt.1 | 9744.0 | 11.1 | 11.5 | 7.1 | 7.7 | 15.4 | 15.4 |
| DEX0477_006.nt.1 | 9744.1 | 11.1 | 11.5 | 7.1 | 7.7 | 15.4 | 15.4 |
| DEX0477_006.nt.1 | 9745.0 | 22.2 | 23.1 | 14.3 | 15.4 | 30.8 | 30.8 |
| DEX0477_006.nt.1 | 9745.1 | 18.5 | 19.2 | 14.3 | 15.4 | 23.1 | 23.1 |
| DEX0477_007.nt.1 | 17852.0 | 77.8 | 77.8 | 85.7 | 85.7 | 69.2 | 69.2 |
| DEX0477_007.nt.1 | 17852.1 | 77.8 | 77.8 | 85.7 | 85.7 | 69.2 | 69.2 |
| DEX0477_007.nt.1 | 17853.0 | 81.5 | 81.5 | 92.9 | 92.9 | 69.2 | 69.2 |
| DEX0477_007.nt.1 | 17853.1 | 85.2 | 85.2 | 92.9 | 92.9 | 76.9 | 76.9 |
| DEX0477_007.nt.1 | 18644.0 | 77.8 | 77.8 | 85.7 | 85.7 | 69.2 | 69.2 |
| DEX0477_007.nt.1 | 18644.1 | 77.8 | 77.8 | 85.7 | 85.7 | 69.2 | 69.2 |
| DEX0477_007.nt.1 | 18644.2 | 74.1 | 76.9 | 78.6 | 84.6 | 69.2 | 69.2 |
| DEX0477_007.nt.1 | 18644.3 | 81.5 | 81.5 | 92.9 | 92.9 | 69.2 | 69.2 |
| DEX0477_007.nt.1 | 18645.0 | 81.5 | 81.5 | 92.9 | 92.9 | 69.2 | 69.2 |
| DEX0477_007.nt.1 | 18645.1 | 81.5 | 81.5 | 92.9 | 92.9 | 69.2 | 69.2 |
| DEX0477_007.nt.1 | 18645.2 | 81.5 | 81.5 | 92.9 | 92.9 | 69.2 | 69.2 |
| DEX0477_007.nt.1 | 18645.3 | 85.2 | 85.2 | 92.9 | 92.9 | 76.9 | 76.9 |
| DEX0477_008.nt.1 | 4733.0 | 74.1 | 80.0 | 64.3 | 69.2 | 84.6 | 91.7 |
| DEX0477_008.nt.1 | 4733.1 | 74.1 | 76.9 | 64.3 | 69.2 | 84.6 | 84.6 |
| DEX0477_008.nt.1 | 4734.0 | 70.4 | 70.4 | 57.1 | 57.1 | 84.6 | 84.6 |
| DEX0477_008.nt.1 | 4734.1 | 66.7 | 69.2 | 57.1 | 57.1 | 76.9 | 83.3 |
| DEX0477_009.nt.1 | 990.0 | 55.6 | 55.6 | 64.3 | 64.3 | 46.2 | 46.2 |
| DEX0477_014.nt.1 | 4538.1 | 3.7 | 100.0 | 0.0 | 0.0 | 7.7 | 100.0 |
| DEX0477_014.nt.1 | 27949.0 | 3.7 | 100.0 | 7.1 | 100.0 | 0.0 | 0.0 |
| DEX0477_014.nt.1 | 27949.1 | 3.7 | 100.0 | 7.1 | 100.0 | 0.0 | 0.0 |
| DEX0477_014.nt.2 | 4538.1 | 3.7 | 100.0 | 0.0 | 0.0 | 7.7 | 100.0 |
| DEX0477_014.nt.2 | 27949.0 | 3.7 | 100.0 | 7.1 | 100.0 | 0.0 | 0.0 |
| DEX0477_014.nt.2 | 27949.1 | 3.7 | 100.0 | 7.1 | 100.0 | 0.0 | 0.0 |
| DEX0477_014.nt.3 | 4538.1 | 3.7 | 100.0 | 0.0 | 0.0 | 7.7 | 100.0 |
| DEX0477_014.nt.3 | 27949.0 | 3.7 | 100.0 | 7.1 | 100.0 | 0.0 | 0.0 |
| DEX0477_014.nt.3 | 27949.1 | 3.7 | 100.0 | 7.1 | 100.0 | 0.0 | 0.0 |
| DEX0477_030.nt.1 | 28117.0 | 48.1 | 86.7 | 71.4 | 83.3 | 23.1 | 100.0 |
| DEX0477_030.nt.1 | 28117.1 | 48.1 | 81.2 | 64.3 | 81.8 | 30.8 | 80.0 |
| DEX0477_030.nt.1 | 28118.0 | 44.4 | 85.7 | 57.1 | 80.0 | 30.8 | 100.0 |
| DEX0477_030.nt.1 | 28118.1 | 44.4 | 80.0 | 64.3 | 81.8 | 23.1 | 75.0 |
| DEX0477_030.nt.2 | 28117.0 | 48.1 | 86.7 | 71.4 | 83.3 | 23.1 | 100.0 |
| DEX0477_030.nt.2 | 28117.1 | 48.1 | 81.2 | 64.3 | 81.8 | 30.8 | 80.0 |
| DEX0477_030.nt.2 | 28118.0 | 44.4 | 85.7 | 57.1 | 80.0 | 30.8 | 100.0 |
| DEX0477_030.nt.2 | 28118.1 | 44.4 | 80.0 | 64.3 | 81.8 | 23.1 | 75.0 |
| DEX0477_030.nt.3 | 28117.0 | 48.1 | 86.7 | 71.4 | 83.3 | 23.1 | 100.0 |
| DEX0477_030.nt.3 | 28117.1 | 48.1 | 81.2 | 64.3 | 81.8 | 30.8 | 80.0 |
| DEX0477_030.nt.3 | 28118.0 | 44.4 | 85.7 | 57.1 | 80.0 | 30.8 | 100.0 |
| DEX0477_030.nt.3 | 28118.1 | 44.4 | 80.0 | 64.3 | 81.8 | 23.1 | 75.0 |
| DEX0477_031.nt.1 | 23480.0 | 14.8 | 15.4 | 21.4 | 23.1 | 7.7 | 7.7 |
| DEX0477_031.nt.1 | 23480.1 | 11.1 | 11.5 | 14.3 | 15.4 | 7.7 | 7.7 |
| DEX0477_031.nt.1 | 23481.0 | 18.5 | 18.5 | 21.4 | 21.4 | 15.4 | 15.4 |
| DEX0477_031.nt.1 | 23481.1 | 14.8 | 15.4 | 14.3 | 15.4 | 15.4 | 15.4 |
| DEX0477_031.nt.1 | 38627.0 | 14.8 | 14.8 | 21.4 | 21.4 | 7.7 | 7.7 |
| DEX0477_031.nt.1 | 38627.1 | 14.8 | 14.8 | 21.4 | 21.4 | 7.7 | 7.7 |
| DEX0477_031.nt.1 | 38628.0 | 18.5 | 18.5 | 21.4 | 21.4 | 15.4 | 15.4 |
| DEX0477_031.nt.1 | 38628.1 | 22.2 | 22.2 | 28.6 | 28.6 | 15.4 | 15.4 |
| DEX0477_033.nt.1 | 19534.0 | 29.6 | 29.6 | 28.6 | 28.6 | 30.8 | 30.8 |
| DEX0477_033.nt.1 | 19534.1 | 29.6 | 29.6 | 28.6 | 28.6 | 30.8 | 30.8 |
| DEX0477_033.nt.1 | 19535.0 | 29.6 | 29.6 | 28.6 | 28.6 | 30.8 | 30.8 |
| DEX0477_033.nt.1 | 19535.1 | 25.9 | 25.9 | 28.6 | 28.6 | 23.1 | 23.1 |
| DEX0477_033.nt.1 | 41957.0 | 33.3 | 33.3 | 35.7 | 35.7 | 30.8 | 30.8 |
| DEX0477_033.nt.1 | 41957.1 | 29.6 | 29.6 | 35.7 | 35.7 | 23.1 | 23.1 |
| DEX0477_033.nt.1 | 41957.2 | 29.6 | 29.6 | 28.6 | 28.6 | 30.8 | 30.8 |
| DEX0477_033.nt.1 | 41958.0 | 37.0 | 37.0 | 35.7 | 35.7 | 38.5 | 38.5 |
| DEX0477_033.nt.1 | 41958.1 | 29.6 | 29.6 | 35.7 | 35.7 | 23.1 | 23.1 |
| DEX0477_033.nt.1 | 41958.2 | 29.6 | 29.6 | 28.6 | 28.6 | 30.8 | 30.8 |
| DEX0477_033.nt.2 | 19534.0 | 29.6 | 29.6 | 28.6 | 28.6 | 30.8 | 30.8 |
| DEX0477_033.nt.2 | 19534.1 | 29.6 | 29.6 | 28.6 | 28.6 | 30.8 | 30.8 |
| DEX0477_033.nt.2 | 19535.0 | 29.6 | 29.6 | 28.6 | 28.6 | 30.8 | 30.8 |
| DEX0477_033.nt.2 | 19535.1 | 25.9 | 25.9 | 28.6 | 28.6 | 23.1 | 23.1 |
| DEX0477_033.nt.2 | 41957.0 | 33.3 | 33.3 | 35.7 | 35.7 | 30.8 | 30.8 |
| DEX0477_033.nt.2 | 41957.1 | 29.6 | 29.6 | 35.7 | 35.7 | 23.1 | 23.1 |
| DEX0477_033.nt.2 | 41957.2 | 29.6 | 29.6 | 28.6 | 28.6 | 30.8 | 30.8 |
| DEX0477_033.nt.2 | 41958.0 | 37.0 | 37.0 | 35.7 | 35.7 | 38.5 | 38.5 |
| DEX0477_033.nt.2 | 41958.1 | 29.6 | 29.6 | 35.7 | 35.7 | 23.1 | 23.1 |
| DEX0477_033.nt.2 | 41958.2 | 29.6 | 29.6 | 28.6 | 28.6 | 30.8 | 30.8 |
| DEX0477_033.nt.3 | 19534.0 | 29.6 | 29.6 | 28.6 | 28.6 | 30.8 | 30.8 |
| DEX0477_033.nt.3 | 19534.1 | 29.6 | 29.6 | 28.6 | 28.6 | 30.8 | 30.8 |
| DEX0477_033.nt.3 | 19535.0 | 29.6 | 29.6 | 28.6 | 28.6 | 30.8 | 30.8 |
| DEX0477_033.nt.3 | 19535.1 | 25.9 | 25.9 | 28.6 | 28.6 | 23.1 | 23.1 |
| DEX0477_033.nt.3 | 41957.0 | 33.3 | 33.3 | 35.7 | 35.7 | 30.8 | 30.8 |
| DEX0477_033.nt.3 | 41957.1 | 29.6 | 29.6 | 35.7 | 35.7 | 23.1 | 23.1 |
| DEX0477_033.nt.3 | 41957.2 | 29.6 | 29.6 | 28.6 | 28.6 | 30.8 | 30.8 |
| DEX0477_033.nt.3 | 41958.0 | 37.0 | 37.0 | 35.7 | 35.7 | 38.5 | 38.5 |
| DEX0477_033.nt.3 | 41958.1 | 29.6 | 29.6 | 35.7 | 35.7 | 23.1 | 23.1 |
| DEX0477_033.nt.3 | 41958.2 | 29.6 | 29.6 | 28.6 | 28.6 | 30.8 | 30.8 |
| DEX0477_034.nt.1 | 3933.0 | 29.6 | 30.8 | 28.6 | 30.8 | 30.8 | 30.8 |
| DEX0477_035.nt.1 | 973.0 | 18.5 | 18.5 | 21.4 | 21.4 | 15.4 | 15.4 |
| DEX0477_035.nt.1 | 996.0 | 59.3 | 59.3 | 71.4 | 71.4 | 46.2 | 46.2 |
| DEX0477_035.nt.2 | 973.0 | 18.5 | 18.5 | 21.4 | 21.4 | 15.4 | 15.4 |
| DEX0477_035.nt.3 | 973.0 | 18.5 | 18.5 | 21.4 | 21.4 | 15.4 | 15.4 |
| DEX0477_035.nt.4 | 973.0 | 18.5 | 18.5 | 21.4 | 21.4 | 15.4 | 15.4 |
| DEX0477_035.nt.4 | 996.0 | 59.3 | 59.3 | 71.4 | 71.4 | 46.2 | 46.2 |
| DEX0477_035.nt.5 | 996.0 | 59.3 | 59.3 | 71.4 | 71.4 | 46.2 | 46.2 |
| DEX0477_036.nt.1 | 2371.0 | 33.3 | 33.3 | 28.6 | 28.6 | 38.5 | 38.5 |
| DEX0477_036.nt.1 | 2406.0 | 37.0 | 37.0 | 35.7 | 35.7 | 38.5 | 38.5 |
| DEX0477_036.nt.1 | 2442.0 | 40.7 | 40.7 | 35.7 | 35.7 | 46.2 | 46.2 |
| DEX0477_036.nt.1 | 3111.0 | 63.0 | 70.8 | 42.9 | 50.0 | 84.6 | 91.7 |
| DEX0477_039.nt.1 | 23480.0 | 14.8 | 15.4 | 21.4 | 23.1 | 7.7 | 7.7 |
| DEX0477_039.nt.1 | 23480.1 | 11.1 | 11.5 | 14.3 | 15.4 | 7.7 | 7.7 |
| DEX0477_039.nt.1 | 23481.0 | 18.5 | 18.5 | 21.4 | 21.4 | 15.4 | 15.4 |
| DEX0477_039.nt.1 | 23481.1 | 14.8 | 15.4 | 14.3 | 15.4 | 15.4 | 15.4 |
| DEX0477_039.nt.1 | 38627.0 | 14.8 | 14.8 | 21.4 | 21.4 | 7.7 | 7.7 |
| DEX0477_039.nt.1 | 38627.1 | 14.8 | 14.8 | 21.4 | 21.4 | 7.7 | 7.7 |
| DEX0477_039.nt.1 | 38628.0 | 18.5 | 18.5 | 21.4 | 21.4 | 15.4 | 15.4 |
| DEX0477_039.nt.1 | 38628.1 | 22.2 | 22.2 | 28.6 | 28.6 | 15.4 | 15.4 |
| DEX0477_042.nt.1 | 3383.0 | 44.4 | 44.4 | 35.7 | 35.7 | 53.8 | 53.8 |
| DEX0477_061.nt.1 | 36404.0 | 25.9 | 28.0 | 42.9 | 42.9 | 7.7 | 9.1 |
| DEX0477_061.nt.1 | 36404.1 | 25.9 | 29.2 | 42.9 | 42.9 | 7.7 | 10.0 |
| DEX0477_061.nt.2 | 36403.0 | 3.7 | 3.7 | 7.1 | 7.1 | 0.0 | 0.0 |
| DEX0477_061.nt.2 | 36403.1 | 3.7 | 3.7 | 7.1 | 7.1 | 0.0 | 0.0 |
| DEX0477_061.nt.2 | 36404.0 | 25.9 | 28.0 | 42.9 | 42.9 | 7.7 | 9.1 |
| DEX0477_061.nt.2 | 36404.1 | 25.9 | 29.2 | 42.9 | 42.9 | 7.7 | 10.0 |
| DEX0477_065.nt.1 | 4941.0 | 29.6 | 29.6 | 28.6 | 28.6 | 30.8 | 30.8 |
| DEX0477_065.nt.2 | 4941.0 | 29.6 | 29.6 | 28.6 | 28.6 | 30.8 | 30.8 |
| DEX0477_065.nt.3 | 4941.0 | 29.6 | 29.6 | 28.6 | 28.6 | 30.8 | 30.8 |
| DEX0477_066.nt.1 | 4941.0 | 29.6 | 29.6 | 28.6 | 28.6 | 30.8 | 30.8 |
| DEX0477_066.nt.2 | 4941.0 | 29.6 | 29.6 | 28.6 | 28.6 | 30.8 | 30.8 |
| DEX0477_068.nt.1 | 5539.0 | 14.8 | 14.8 | 7.1 | 7.1 | 23.1 | 23.1 |
| DEX0477_070.nt.1 | 3745.0 | 33.3 | 33.3 | 28.6 | 28.6 | 38.5 | 38.5 |
| DEX0477_076.nt.1 | 1383.0 | 18.5 | 18.5 | 28.6 | 28.6 | 7.7 | 7.7 |

[0586] Lung Cancer Chips

[0587] For lung cancer two different chip designs were evaluated with overlapping sets of a total of 29 samples, comparing the expression patterns of lung cancer derived polyA+ RNA to polyA+ RNA isolated from a pool of 12 normal lung tissues. For the Lung Array Chip all 29 samples (15 squamous cell carcinomas and 14 adenocarcinomas including 14 stage I and 15 stage II/III cancers) were analyzed. For the Multi-Cancer Array Chip a subset of 22 of these samples (10 squamous cell carcinomas, 12 adenocarcinomas) were assessed. In addition to tissue samples, five lung cancer cell lines (CA549, CH522, CH226, CH2170, CSHP77) were analyzed on the Lung Array Chip.

[0588] The results for the statistically significant up-regulated genes on the Lung Array Chip are shown in Table(s) 13-15. The results for the statistically significant up-regulated genes on the Multi-Cancer Array Chip are shown in Table(s) 16-17. The first two columns of each table contain information about the sequence itself (DEX ID, Oligo Name), the next columns show the results obtained for all (“ALL”) lung cancer samples, squamous cell carcinomas (“SQ”), adenocarcinomas (“AD”), or cancers corresponding to stage I (“ST1”), or stages II and III (“ST2,3”). ‘% up’ indicates the percentage of all experiments in which up-regulation of at least 2-fold was observed (n=29 for Lung Array Chip, n=22 for Multi-Cancer Array Chip), ‘% valid up’ indicates the percentage of experiments with valid expression values in which up-regulation of at least 2-fold was observed. For the cell lines, ‘% up’ indicates the percentage of all experiments in which up-regulation of at least 1.8-fold was observed (n=5 for Lung Array Chip), ‘% valid up’ indicates the percentage of experiments with valid expression values in which up-regulation of at least 1.8-fold was observed. Additional experiments were performed, generally the results are only reported below if the data showed 30% or greater up-regulation in at least one of the experimental subsets.

TABLE 13

| | | | Lng | | Lng | | Lng | | Lng | | Lng |
|---|---|---|---|---|---|---|---|---|---|---|---|
| | | Lng | ALL % | Lng | SQ % | Lng | AD % | Lng | ST1 % | Lng | ST2, 3 % |
| | | ALL | valid | SQ | valid | AD | valid | ST1 | valid | ST2, 3 | valid |
| | Oligo | % up | up | % up | up | % up | up | % up | up | % up | up |
| DEX ID | Name | n = 29 | n = 29 | n = 15 | n = 15 | n = 14 | n = 14 | n = 14 | n = 14 | n = 15 | n = 15 |
| DEX0477_004.nt.1 | 1192.0 | 44.8 | 52.0 | 60.0 | 75.0 | 28.6 | 30.8 | 57.1 | 57.1 | 33.3 | 45.5 |
| DEX0477_004.nt.1 | 1193.0 | 58.6 | 70.8 | 66.7 | 83.3 | 50.0 | 58.3 | 85.7 | 92.3 | 33.3 | 45.5 |
| DEX0477_004.nt.1 | 1198.0 | 48.3 | 56.0 | 60.0 | 75.0 | 35.7 | 38.5 | 64.3 | 64.3 | 33.3 | 45.5 |
| DEX0477_004.nt.1 | 5491.0 | 48.3 | 58.3 | 60.0 | 75.0 | 35.7 | 41.7 | 64.3 | 69.2 | 33.3 | 45.5 |
| DEX0477_007.nt.1 | 18645.0 | 13.8 | 15.4 | 6.7 | 7.7 | 21.4 | 23.1 | 21.4 | 25.0 | 6.7 | 7.1 |
| DEX0477_007.nt.1 | 18645.2 | 10.3 | 10.7 | 6.7 | 6.7 | 14.3 | 15.4 | 14.3 | 14.3 | 6.7 | 7.1 |
| DEX0477_008.nt.1 | 1559.0 | 0.0 | 0.0 | 0.0 | 0.0 | 0.0 | 0.0 | 0.0 | 0.0 | 0.0 | 0.0 |
| DEX0477_008.nt.1 | 4733.0 | 89.7 | 89.7 | 86.7 | 86.7 | 92.9 | 92.9 | 92.9 | 92.9 | 86.7 | 86.7 |
| DEX0477_008.nt.1 | 4734.0 | 89.7 | 89.7 | 86.7 | 86.7 | 92.9 | 92.9 | 92.9 | 92.9 | 86.7 | 86.7 |
| DEX0477_016.nt.1 | 37143.0 | 20.7 | 20.7 | 6.7 | 6.7 | 35.7 | 35.7 | 35.7 | 35.7 | 6.7 | 6.7 |
| DEX0477_016.nt.1 | 37143.2 | 20.7 | 20.7 | 6.7 | 6.7 | 35.7 | 35.7 | 35.7 | 35.7 | 6.7 | 6.7 |
| DEX0477_016.nt.2 | 37143.0 | 20.7 | 20.7 | 6.7 | 6.7 | 35.7 | 35.7 | 35.7 | 35.7 | 6.7 | 6.7 |
| DEX0477_016.nt.2 | 37143.2 | 20.7 | 20.7 | 6.7 | 6.7 | 35.7 | 35.7 | 35.7 | 35.7 | 6.7 | 6.7 |
| DEX0477_016.nt.4 | 37143.0 | 20.7 | 20.7 | 6.7 | 6.7 | 35.7 | 35.7 | 35.7 | 35.7 | 6.7 | 6.7 |
| DEX0477_016.nt.4 | 37143.2 | 20.7 | 20.7 | 6.7 | 6.7 | 35.7 | 35.7 | 35.7 | 35.7 | 6.7 | 6.7 |
| DEX0477_016.nt.5 | 37143.0 | 20.7 | 20.7 | 6.7 | 6.7 | 35.7 | 35.7 | 35.7 | 35.7 | 6.7 | 6.7 |
| DEX0477_016.nt.5 | 37143.2 | 20.7 | 20.7 | 6.7 | 6.7 | 35.7 | 35.7 | 35.7 | 35.7 | 6.7 | 6.7 |
| DEX0477_019.nt.1 | 41937.0 | 20.7 | 21.4 | 6.7 | 6.7 | 35.7 | 38.5 | 35.7 | 35.7 | 6.7 | 7.1 |
| DEX0477_019.nt.1 | 41938.0 | 20.7 | 20.7 | 6.7 | 6.7 | 35.7 | 35.7 | 35.7 | 35.7 | 6.7 | 6.7 |
| DEX0477_019.nt.1 | 41938.2 | 37.9 | 42.3 | 26.7 | 30.8 | 50.0 | 53.8 | 42.9 | 42.9 | 33.3 | 41.7 |
| DEX0477_019.nt.1 | 41938.3 | 34.5 | 38.5 | 20.0 | 25.0 | 50.0 | 50.0 | 35.7 | 38.5 | 33.3 | 38.5 |
| DEX0477_019.nt.1 | 41939.0 | 37.9 | 39.3 | 26.7 | 26.7 | 50.0 | 53.8 | 42.9 | 42.9 | 33.3 | 35.7 |
| DEX0477_019.nt.1 | 41940.0 | 34.5 | 35.7 | 20.0 | 21.4 | 50.0 | 50.0 | 35.7 | 35.7 | 33.3 | 35.7 |
| DEX0477_020.nt.1 | 41937.0 | 20.7 | 21.4 | 6.7 | 6.7 | 35.7 | 38.5 | 35.7 | 35.7 | 6.7 | 7.1 |
| DEX0477_020.nt.1 | 41938.0 | 20.7 | 20.7 | 6.7 | 6.7 | 35.7 | 35.7 | 35.7 | 35.7 | 6.7 | 6.7 |
| DEX0477_020.nt.1 | 41938.2 | 37.9 | 42.3 | 26.7 | 30.8 | 50.0 | 53.8 | 42.9 | 42.9 | 33.3 | 41.7 |
| DEX0477_020.nt.1 | 41938.3 | 34.5 | 38.5 | 20.0 | 25.0 | 50.0 | 50.0 | 35.7 | 38.5 | 33.3 | 38.5 |
| DEX0477_020.nt.1 | 41939.0 | 37.9 | 39.3 | 26.7 | 26.7 | 50.0 | 53.8 | 42.9 | 42.9 | 33.3 | 35.7 |
| DEX0477_020.nt.1 | 41940.0 | 34.5 | 35.7 | 20.0 | 21.4 | 50.0 | 50.0 | 35.7 | 35.7 | 33.3 | 35.7 |
| DEX0477_020.nt.2 | 41937.0 | 20.7 | 21.4 | 6.7 | 6.7 | 35.7 | 38.5 | 35.7 | 35.7 | 6.7 | 7.1 |
| DEX0477_020.nt.2 | 41938.0 | 20.7 | 20.7 | 6.7 | 6.7 | 35.7 | 35.7 | 35.7 | 35.7 | 6.7 | 6.7 |
| DEX0477_020.nt.2 | 41938.2 | 37.9 | 42.3 | 26.7 | 30.8 | 50.0 | 53.8 | 42.9 | 42.9 | 33.3 | 41.7 |
| DEX0477_020.nt.2 | 41938.3 | 34.5 | 38.5 | 20.0 | 25.0 | 50.0 | 50.0 | 35.7 | 38.5 | 33.3 | 38.5 |
| DEX0477_020.nt.2 | 41939.0 | 37.9 | 39.3 | 26.7 | 26.7 | 50.0 | 53.8 | 42.9 | 42.9 | 33.3 | 35.7 |
| DEX0477_020.nt.2 | 41940.0 | 34.5 | 35.7 | 20.0 | 21.4 | 50.0 | 50.0 | 35.7 | 35.7 | 33.3 | 35.7 |
| DEX0477_021.nt.1 | 33088.0 | 27.6 | 27.6 | 6.7 | 6.7 | 50.0 | 50.0 | 35.7 | 35.7 | 20.0 | 20.0 |
| DEX0477_021.nt.1 | 33088.2 | 27.6 | 27.6 | 6.7 | 6.7 | 50.0 | 50.0 | 35.7 | 35.7 | 20.0 | 20.0 |
| DEX0477_021.nt.1 | 41945.0 | 27.6 | 27.6 | 6.7 | 6.7 | 50.0 | 50.0 | 35.7 | 35.7 | 20.0 | 20.0 |
| DEX0477_021.nt.1 | 41946.0 | 27.6 | 27.6 | 6.7 | 6.7 | 50.0 | 50.0 | 35.7 | 35.7 | 20.0 | 20.0 |
| DEX0477_021.nt.2 | 33088.0 | 27.6 | 27.6 | 6.7 | 6.7 | 50.0 | 50.0 | 35.7 | 35.7 | 20.0 | 20.0 |
| DEX0477_021.nt.2 | 33088.2 | 27.6 | 27.6 | 6.7 | 6.7 | 50.0 | 50.0 | 35.7 | 35.7 | 20.0 | 20.0 |
| DEX0477_021.nt.2 | 41945.0 | 27.6 | 27.6 | 6.7 | 6.7 | 50.0 | 50.0 | 35.7 | 35.7 | 20.0 | 20.0 |
| DEX0477_021.nt.2 | 41946.0 | 27.6 | 27.6 | 6.7 | 6.7 | 50.0 | 50.0 | 35.7 | 35.7 | 20.0 | 20.0 |
| DEX0477_022.nt.1 | 41937.0 | 20.7 | 21.4 | 6.7 | 6.7 | 35.7 | 38.5 | 35.7 | 35.7 | 6.7 | 7.1 |
| DEX0477_022.nt.1 | 41939.0 | 37.9 | 39.3 | 26.7 | 26.7 | 50.0 | 53.8 | 42.9 | 42.9 | 33.3 | 35.7 |
| DEX0477_022.nt.1 | 41940.0 | 34.5 | 35.7 | 20.0 | 21.4 | 50.0 | 50.0 | 35.7 | 35.7 | 33.3 | 35.7 |
| DEX0477_023.nt.1 | 33088.0 | 27.6 | 27.6 | 6.7 | 6.7 | 50.0 | 50.0 | 35.7 | 35.7 | 20.0 | 20.0 |
| DEX0477_023.nt.1 | 33088.2 | 27.6 | 27.6 | 6.7 | 6.7 | 50.0 | 50.0 | 35.7 | 35.7 | 20.0 | 20.0 |
| DEX0477_024.nt.1 | 41945.0 | 27.6 | 27.6 | 6.7 | 6.7 | 50.0 | 50.0 | 35.7 | 35.7 | 20.0 | 20.0 |
| DEX0477_024.nt.1 | 41946.0 | 27.6 | 27.6 | 6.7 | 6.7 | 50.0 | 50.0 | 35.7 | 35.7 | 20.0 | 20.0 |
| DEX0477_024.nt.2 | 41945.0 | 27.6 | 27.6 | 6.7 | 6.7 | 50.0 | 50.0 | 35.7 | 35.7 | 20.0 | 20.0 |
| DEX0477_024.nt.2 | 41946.0 | 27.6 | 27.6 | 6.7 | 6.7 | 50.0 | 50.0 | 35.7 | 35.7 | 20.0 | 20.0 |
| DEX0477_024.nt.3 | 41945.0 | 27.6 | 27.6 | 6.7 | 6.7 | 50.0 | 50.0 | 35.7 | 35.7 | 20.0 | 20.0 |
| DEX0477_024.nt.3 | 41946.0 | 27.6 | 27.6 | 6.7 | 6.7 | 50.0 | 50.0 | 35.7 | 35.7 | 20.0 | 20.0 |
| DEX0477_024.nt.4 | 41945.0 | 27.6 | 27.6 | 6.7 | 6.7 | 50.0 | 50.0 | 35.7 | 35.7 | 20.0 | 20.0 |
| DEX0477_024.nt.4 | 41946.0 | 27.6 | 27.6 | 6.7 | 6.7 | 50.0 | 50.0 | 35.7 | 35.7 | 20.0 | 20.0 |
| DEX0477_025.nt.1 | 889.0 | 93.1 | 93.1 | 100.0 | 100.0 | 85.7 | 85.7 | 92.9 | 92.9 | 93.3 | 93.3 |
| DEX0477_025.nt.1 | 890.0 | 89.7 | 92.9 | 93.3 | 100.0 | 85.7 | 85.7 | 85.7 | 92.3 | 93.3 | 93.3 |
| DEX0477_033.nt.1 | 1350.0 | 27.6 | 28.6 | 40.0 | 40.0 | 14.3 | 15.4 | 28.6 | 30.8 | 26.7 | 26.7 |
| DEX0477_033.nt.1 | 1351.0 | 31.0 | 34.6 | 40.0 | 42.9 | 21.4 | 25.0 | 42.9 | 46.2 | 20.0 | 23.1 |
| DEX0477_033.nt.1 | 3410.0 | 27.6 | 29.6 | 33.3 | 38.5 | 21.4 | 21.4 | 35.7 | 38.5 | 20.0 | 21.4 |
| DEX0477_033.nt.1 | 3411.0 | 31.0 | 31.0 | 40.0 | 40.0 | 21.4 | 21.4 | 42.9 | 42.9 | 20.0 | 20.0 |
| DEX0477_033.nt.1 | 19535.0 | 31.0 | 32.1 | 40.0 | 42.9 | 21.4 | 21.4 | 42.9 | 42.9 | 20.0 | 21.4 |
| DEX0477_033.nt.1 | 19535.2 | 31.0 | 36.0 | 40.0 | 42.9 | 21.4 | 27.3 | 42.9 | 46.2 | 20.0 | 25.0 |
| DEX0477_033.nt.1 | 41957.0 | 31.0 | 33.3 | 40.0 | 46.2 | 21.4 | 21.4 | 42.9 | 42.9 | 20.0 | 23.1 |
| DEX0477_033.nt.1 | 41958.0 | 27.6 | 27.6 | 33.3 | 33.3 | 21.4 | 21.4 | 35.7 | 35.7 | 20.0 | 20.0 |
| DEX0477_033.nt.2 | 1350.0 | 27.6 | 28.6 | 40.0 | 40.0 | 14.3 | 15.4 | 28.6 | 30.8 | 26.7 | 26.7 |
| DEX0477_033.nt.2 | 1351.0 | 31.0 | 34.6 | 40.0 | 42.9 | 21.4 | 25.0 | 42.9 | 46.2 | 20.0 | 23.1 |
| DEX0477_033.nt.2 | 3410.0 | 27.6 | 29.6 | 33.3 | 38.5 | 21.4 | 21.4 | 35.7 | 38.5 | 20.0 | 21.4 |
| DEX0477_033.nt.2 | 3411.0 | 31.0 | 31.0 | 40.0 | 40.0 | 21.4 | 21.4 | 42.9 | 42.9 | 20.0 | 20.0 |
| DEX0477_033.nt.2 | 19535.0 | 31.0 | 32.1 | 40.0 | 42.9 | 21.4 | 21.4 | 42.9 | 42.9 | 20.0 | 21.4 |
| DEX0477_033.nt.2 | 19535.2 | 31.0 | 36.0 | 40.0 | 42.9 | 21.4 | 27.3 | 42.9 | 46.2 | 20.0 | 25.0 |
| DEX0477_033.nt.2 | 41957.0 | 31.0 | 33.3 | 40.0 | 46.2 | 21.4 | 21.4 | 42.9 | 42.9 | 20.0 | 23.1 |
| DEX0477_033.nt.2 | 41958.0 | 27.6 | 27.6 | 33.3 | 33.3 | 21.4 | 21.4 | 35.7 | 35.7 | 20.0 | 20.0 |
| DEX0477_033.nt.3 | 1350.0 | 27.6 | 28.6 | 40.0 | 40.0 | 14.3 | 15.4 | 28.6 | 30.8 | 26.7 | 26.7 |
| DEX0477_033.nt.3 | 1351.0 | 31.0 | 34.6 | 40.0 | 42.9 | 21.4 | 25.0 | 42.9 | 46.2 | 20.0 | 23.1 |
| DEX0477_033.nt.3 | 3410.0 | 27.6 | 29.6 | 33.3 | 38.5 | 21.4 | 21.4 | 35.7 | 38.5 | 20.0 | 21.4 |
| DEX0477_033.nt.3 | 3411.0 | 31.0 | 31.0 | 40.0 | 40.0 | 21.4 | 21.4 | 42.9 | 42.9 | 20.0 | 20.0 |
| DEX0477_033.nt.3 | 19535.0 | 31.0 | 32.1 | 40.0 | 42.9 | 21.4 | 21.4 | 42.9 | 42.9 | 20.0 | 21.4 |
| DEX0477_033.nt.3 | 19535.2 | 31.0 | 36.0 | 40.0 | 42.9 | 21.4 | 27.3 | 42.9 | 46.2 | 20.0 | 25.0 |
| DEX0477_033.nt.3 | 41957.0 | 31.0 | 33.3 | 40.0 | 46.2 | 21.4 | 21.4 | 42.9 | 42.9 | 20.0 | 23.1 |
| DEX0477_033.nt.3 | 41958.0 | 27.6 | 27.6 | 33.3 | 33.3 | 21.4 | 21.4 | 35.7 | 35.7 | 20.0 | 20.0 |
| DEX0477_036.nt.1 | 2370.0 | 58.6 | 60.7 | 80.0 | 85.7 | 35.7 | 35.7 | 57.1 | 57.1 | 60.0 | 64.3 |
| DEX0477_036.nt.1 | 2407.0 | 62.1 | 64.3 | 80.0 | 80.0 | 42.9 | 46.2 | 57.1 | 57.1 | 66.7 | 71.4 |
| DEX0477_036.nt.1 | 2443.0 | 69.0 | 71.4 | 80.0 | 80.0 | 57.1 | 61.5 | 57.1 | 57.1 | 80.0 | 85.7 |
| DEX0477_036.nt.1 | 2446.0 | 65.5 | 65.5 | 73.3 | 73.3 | 57.1 | 57.1 | 50.0 | 50.0 | 80.0 | 80.0 |
| DEX0477_038.nt.1 | 2644.0 | 89.7 | 89.7 | 93.3 | 93.3 | 85.7 | 85.7 | 85.7 | 85.7 | 93.3 | 93.3 |
| DEX0477_038.nt.2 | 2644.0 | 89.7 | 89.7 | 93.3 | 93.3 | 85.7 | 85.7 | 85.7 | 85.7 | 93.3 | 93.3 |
| DEX0477_038.nt.3 | 2644.0 | 89.7 | 89.7 | 93.3 | 93.3 | 85.7 | 85.7 | 85.7 | 85.7 | 93.3 | 93.3 |
| DEX0477_040.nt.1 | 3716.0 | 51.7 | 51.7 | 40.0 | 40.0 | 64.3 | 64.3 | 57.1 | 57.1 | 46.7 | 46.7 |
| DEX0477_040.nt.1 | 3717.0 | 44.8 | 44.8 | 33.3 | 33.3 | 57.1 | 57.1 | 42.9 | 42.9 | 46.7 | 46.7 |
| DEX0477_040.nt.2 | 3716.0 | 51.7 | 51.7 | 40.0 | 40.0 | 64.3 | 64.3 | 57.1 | 57.1 | 46.7 | 46.7 |
| DEX0477_040.nt.2 | 3717.0 | 44.8 | 44.8 | 33.3 | 33.3 | 57.1 | 57.1 | 42.9 | 42.9 | 46.7 | 46.7 |
| DEX0477_042.nt.1 | 3382.0 | 34.5 | 34.5 | 20.0 | 20.0 | 50.0 | 50.0 | 42.9 | 42.9 | 26.7 | 26.7 |
| DEX0477_043.nt.1 | 1190.0 | 37.9 | 40.7 | 60.0 | 64.3 | 14.3 | 15.4 | 50.0 | 50.0 | 26.7 | 30.8 |
| DEX0477_043.nt.1 | 1191.0 | 37.9 | 37.9 | 66.7 | 66.7 | 7.1 | 7.1 | 42.9 | 42.9 | 33.3 | 33.3 |
| DEX0477_043.nt.1 | 1234.0 | 51.7 | 51.7 | 80.0 | 80.0 | 21.4 | 21.4 | 57.1 | 57.1 | 46.7 | 46.7 |
| DEX0477_043.nt.1 | 1235.0 | 44.8 | 44.8 | 73.3 | 73.3 | 14.3 | 14.3 | 35.7 | 35.7 | 53.3 | 53.3 |
| DEX0477_046.nt.1 | 1550.0 | 0.0 | 0.0 | 0.0 | 0.0 | 0.0 | 0.0 | 0.0 | 0.0 | 0.0 | 0.0 |
| DEX0477_046.nt.1 | 1552.0 | 17.2 | 17.2 | 0.0 | 0.0 | 35.7 | 35.7 | 28.6 | 28.6 | 6.7 | 6.7 |
| DEX0477_046.nt.1 | 1553.0 | 24.1 | 25.0 | 13.3 | 14.3 | 35.7 | 35.7 | 35.7 | 38.5 | 13.3 | 13.3 |
| DEX0477_047.nt.1 | 451.0 | 51.7 | 53.6 | 80.0 | 80.0 | 21.4 | 23.1 | 50.0 | 50.0 | 53.3 | 57.1 |
| DEX0477_050.nt.1 | 1190.0 | 37.9 | 40.7 | 60.0 | 64.3 | 14.3 | 15.4 | 50.0 | 50.0 | 26.7 | 30.8 |
| DEX0477_050.nt.1 | 1191.0 | 37.9 | 37.9 | 66.7 | 66.7 | 7.1 | 7.1 | 42.9 | 42.9 | 33.3 | 33.3 |
| DEX0477_050.nt.1 | 1234.0 | 51.7 | 51.7 | 80.0 | 80.0 | 21.4 | 21.4 | 57.1 | 57.1 | 46.7 | 46.7 |
| DEX0477_050.nt.1 | 1235.0 | 44.8 | 44.8 | 73.3 | 73.3 | 14.3 | 14.3 | 35.7 | 35.7 | 53.3 | 53.3 |
| DEX0477_051.nt.1 | 1606.0 | 44.8 | 46.4 | 66.7 | 71.4 | 21.4 | 21.4 | 57.1 | 57.1 | 33.3 | 35.7 |
| DEX0477_051.nt.1 | 1607.0 | 44.8 | 44.8 | 66.7 | 66.7 | 21.4 | 21.4 | 57.1 | 57.1 | 33.3 | 33.3 |
| DEX0477_051.nt.1 | 1642.0 | 17.2 | 19.2 | 33.3 | 33.3 | 0.0 | 0.0 | 14.3 | 16.7 | 20.0 | 21.4 |
| DEX0477_051.nt.1 | 3080.0 | 72.4 | 72.4 | 86.7 | 86.7 | 57.1 | 57.1 | 78.6 | 78.6 | 66.7 | 66.7 |
| DEX0477_053.nt.1 | 1190.0 | 37.9 | 40.7 | 60.0 | 64.3 | 14.3 | 15.4 | 50.0 | 50.0 | 26.7 | 30.8 |
| DEX0477_053.nt.1 | 1191.0 | 37.9 | 37.9 | 66.7 | 66.7 | 7.1 | 7.1 | 42.9 | 42.9 | 33.3 | 33.3 |
| DEX0477_053.nt.1 | 1234.0 | 51.7 | 51.7 | 80.0 | 80.0 | 21.4 | 21.4 | 57.1 | 57.1 | 46.7 | 46.7 |
| DEX0477_053.nt.1 | 1235.0 | 44.8 | 44.8 | 73.3 | 73.3 | 14.3 | 14.3 | 35.7 | 35.7 | 53.3 | 53.3 |
| DEX0477_054.nt.1 | 9340.0 | 24.1 | 41.2 | 33.3 | 62.5 | 14.3 | 22.2 | 14.3 | 25.0 | 33.3 | 55.6 |
| DEX0477_054.nt.1 | 9340.2 | 24.1 | 41.2 | 33.3 | 62.5 | 14.3 | 22.2 | 14.3 | 25.0 | 33.3 | 55.6 |
| DEX0477_054.nt.2 | 9341.0 | 37.9 | 37.9 | 66.7 | 66.7 | 7.1 | 7.1 | 50.0 | 50.0 | 26.7 | 26.7 |
| DEX0477_054.nt.2 | 9341.2 | 41.4 | 41.4 | 73.3 | 73.3 | 7.1 | 7.1 | 50.0 | 50.0 | 33.3 | 33.3 |
| DEX0477_055.nt.1 | 1190.0 | 37.9 | 40.7 | 60.0 | 64.3 | 14.3 | 15.4 | 50.0 | 50.0 | 26.7 | 30.8 |
| DEX0477_055.nt.1 | 5605.0 | 20.7 | 21.4 | 33.3 | 33.3 | 7.1 | 7.7 | 28.6 | 28.6 | 13.3 | 14.3 |
| DEX0477_055.nt.1 | 5606.0 | 20.7 | 22.2 | 33.3 | 35.7 | 7.1 | 7.7 | 28.6 | 28.6 | 13.3 | 15.4 |
| DEX0477_055.nt.1 | 5607.0 | 41.4 | 41.4 | 66.7 | 66.7 | 14.3 | 14.3 | 50.0 | 50.0 | 33.3 | 33.3 |
| DEX0477_055.nt.1 | 5611.0 | 20.7 | 21.4 | 33.3 | 33.3 | 7.1 | 7.7 | 28.6 | 30.8 | 13.3 | 13.3 |
| DEX0477_055.nt.1 | 5624.0 | 27.6 | 34.8 | 40.0 | 50.0 | 14.3 | 18.2 | 35.7 | 45.5 | 20.0 | 25.0 |
| DEX0477_055.nt.1 | 5637.0 | 27.6 | 28.6 | 46.7 | 46.7 | 7.1 | 7.7 | 42.9 | 46.2 | 13.3 | 13.3 |
| DEX0477_055.nt.1 | 5638.0 | 31.0 | 32.1 | 46.7 | 50.0 | 14.3 | 14.3 | 50.0 | 50.0 | 13.3 | 14.3 |
| DEX0477_055.nt.1 | 5639.0 | 31.0 | 32.1 | 40.0 | 42.9 | 21.4 | 21.4 | 42.9 | 46.2 | 20.0 | 20.0 |
| DEX0477_055.nt.1 | 5640.0 | 31.0 | 32.1 | 40.0 | 42.9 | 21.4 | 21.4 | 42.9 | 46.2 | 20.0 | 20.0 |
| DEX0477_055.nt.2 | 1187.0 | 37.9 | 37.9 | 66.7 | 66.7 | 7.1 | 7.1 | 42.9 | 42.9 | 33.3 | 33.3 |
| DEX0477_055.nt.2 | 1190.0 | 37.9 | 40.7 | 60.0 | 64.3 | 14.3 | 15.4 | 50.0 | 50.0 | 26.7 | 30.8 |
| DEX0477_055.nt.2 | 5605.0 | 20.7 | 21.4 | 33.3 | 33.3 | 7.1 | 7.7 | 28.6 | 28.6 | 13.3 | 14.3 |
| DEX0477_055.nt.2 | 5606.0 | 20.7 | 22.2 | 33.3 | 35.7 | 7.1 | 7.7 | 28.6 | 28.6 | 13.3 | 15.4 |
| DEX0477_055.nt.2 | 5607.0 | 41.4 | 41.4 | 66.7 | 66.7 | 14.3 | 14.3 | 50.0 | 50.0 | 33.3 | 33.3 |
| DEX0477_055.nt.2 | 5611.0 | 20.7 | 21.4 | 33.3 | 33.3 | 7.1 | 7.7 | 28.6 | 30.8 | 13.3 | 13.3 |
| DEX0477_055.nt.2 | 5624.0 | 27.6 | 34.8 | 40.0 | 50.0 | 14.3 | 18.2 | 35.7 | 45.5 | 20.0 | 25.0 |
| DEX0477_055.nt.2 | 5637.0 | 27.6 | 28.6 | 46.7 | 46.7 | 7.1 | 7.7 | 42.9 | 46.2 | 13.3 | 13.3 |
| DEX0477_055.nt.2 | 5638.0 | 31.0 | 32.1 | 46.7 | 50.0 | 14.3 | 14.3 | 50.0 | 50.0 | 13.3 | 14.3 |
| DEX0477_055.nt.2 | 5639.0 | 31.0 | 32.1 | 40.0 | 42.9 | 21.4 | 21.4 | 42.9 | 46.2 | 20.0 | 20.0 |
| DEX0477_055.nt.2 | 5640.0 | 31.0 | 32.1 | 40.0 | 42.9 | 21.4 | 21.4 | 42.9 | 46.2 | 20.0 | 20.0 |
| DEX0477_055.nt.3 | 1187.0 | 37.9 | 37.9 | 66.7 | 66.7 | 7.1 | 7.1 | 42.9 | 42.9 | 33.3 | 33.3 |
| DEX0477_055.nt.3 | 1190.0 | 37.9 | 40.7 | 60.0 | 64.3 | 14.3 | 15.4 | 50.0 | 50.0 | 26.7 | 30.8 |
| DEX0477_055.nt.3 | 5605.0 | 20.7 | 21.4 | 33.3 | 33.3 | 7.1 | 7.7 | 28.6 | 28.6 | 13.3 | 14.3 |
| DEX0477_055.nt.3 | 5606.0 | 20.7 | 22.2 | 33.3 | 35.7 | 7.1 | 7.7 | 28.6 | 28.6 | 13.3 | 15.4 |
| DEX0477_055.nt.3 | 5607.0 | 41.4 | 41.4 | 66.7 | 66.7 | 14.3 | 14.3 | 50.0 | 50.0 | 33.3 | 33.3 |
| DEX0477_055.nt.3 | 5611.0 | 20.7 | 21.4 | 33.3 | 33.3 | 7.1 | 7.7 | 28.6 | 30.8 | 13.3 | 13.3 |
| DEX0477_055.nt.3 | 5624.0 | 27.6 | 34.8 | 40.0 | 50.0 | 14.3 | 18.2 | 35.7 | 45.5 | 20.0 | 25.0 |
| DEX0477_055.nt.3 | 5637.0 | 27.6 | 28.6 | 46.7 | 46.7 | 7.1 | 7.7 | 42.9 | 46.2 | 13.3 | 13.3 |
| DEX0477_055.nt.3 | 5638.0 | 31.0 | 32.1 | 46.7 | 50.0 | 14.3 | 14.3 | 50.0 | 50.0 | 13.3 | 14.3 |
| DEX0477_055.nt.3 | 5639.0 | 31.0 | 32.1 | 40.0 | 42.9 | 21.4 | 21.4 | 42.9 | 46.2 | 20.0 | 20.0 |
| DEX0477_055.nt.3 | 5640.0 | 31.0 | 32.1 | 40.0 | 42.9 | 21.4 | 21.4 | 42.9 | 46.2 | 20.0 | 20.0 |
| DEX0477_055.nt.4 | 1190.0 | 37.9 | 40.7 | 60.0 | 64.3 | 14.3 | 15.4 | 50.0 | 50.0 | 26.7 | 30.8 |
| DEX0477_055.nt.4 | 5605.0 | 20.7 | 21.4 | 33.3 | 33.3 | 7.1 | 7.7 | 28.6 | 28.6 | 13.3 | 14.3 |
| DEX0477_055.nt.4 | 5606.0 | 20.7 | 22.2 | 33.3 | 35.7 | 7.1 | 7.7 | 28.6 | 28.6 | 13.3 | 15.4 |
| DEX0477_055.nt.4 | 5611.0 | 20.7 | 21.4 | 33.3 | 33.3 | 7.1 | 7.7 | 28.6 | 30.8 | 13.3 | 13.3 |
| DEX0477_055.nt.4 | 5624.0 | 27.6 | 34.8 | 40.0 | 50.0 | 14.3 | 18.2 | 35.7 | 45.5 | 20.0 | 25.0 |
| DEX0477_055.nt.4 | 5639.0 | 31.0 | 32.1 | 40.0 | 42.9 | 21.4 | 21.4 | 42.9 | 46.2 | 20.0 | 20.0 |
| DEX0477_055.nt.4 | 5640.0 | 31.0 | 32.1 | 40.0 | 42.9 | 21.4 | 21.4 | 42.9 | 46.2 | 20.0 | 20.0 |
| DEX0477_056.nt.1 | 3805.0 | 34.5 | 34.5 | 60.0 | 60.0 | 7.1 | 7.1 | 42.9 | 42.9 | 26.7 | 26.7 |
| DEX0477_056.nt.1 | 3816.0 | 37.9 | 37.9 | 66.7 | 66.7 | 7.1 | 7.1 | 42.9 | 42.9 | 33.3 | 33.3 |
| DEX0477_056.nt.1 | 3817.0 | 34.5 | 34.5 | 60.0 | 60.0 | 7.1 | 7.1 | 42.9 | 42.9 | 26.7 | 26.7 |
| DEX0477_067.nt.1 | 4787.0 | 34.5 | 38.5 | 26.7 | 28.6 | 42.9 | 50.0 | 42.9 | 46.2 | 26.7 | 30.8 |
| DEX0477_067.nt.1 | 4788.0 | 31.0 | 39.1 | 20.0 | 23.1 | 42.9 | 60.0 | 35.7 | 41.7 | 26.7 | 36.4 |
| DEX0477_068.nt.1 | 4480.0 | 24.1 | 24.1 | 33.3 | 33.3 | 14.3 | 14.3 | 21.4 | 21.4 | 26.7 | 26.7 |
| DEX0477_069.nt.1 | 4893.0 | 13.8 | 17.4 | 13.3 | 16.7 | 14.3 | 18.2 | 7.1 | 7.7 | 20.0 | 30.0 |
| DEX0477_069.nt.1 | 4894.0 | 24.1 | 53.8 | 20.0 | 42.9 | 28.6 | 66.7 | 21.4 | 42.9 | 26.7 | 66.7 |
| DEX0477_070.nt.1 | 3744.0 | 20.7 | 21.4 | 26.7 | 28.6 | 14.3 | 14.3 | 35.7 | 35.7 | 6.7 | 7.1 |
| DEX0477_071.nt.1 | 4957.0 | 48.3 | 48.3 | 66.7 | 66.7 | 28.6 | 28.6 | 42.9 | 42.9 | 53.3 | 53.3 |
| DEX0477_071.nt.1 | 4958.0 | 44.8 | 44.8 | 60.0 | 60.0 | 28.6 | 28.6 | 42.9 | 42.9 | 46.7 | 46.7 |
| DEX0477_071.nt.2 | 4957.0 | 48.3 | 48.3 | 66.7 | 66.7 | 28.6 | 28.6 | 42.9 | 42.9 | 53.3 | 53.3 |
| DEX0477_071.nt.2 | 4958.0 | 44.8 | 44.8 | 60.0 | 60.0 | 28.6 | 28.6 | 42.9 | 42.9 | 46.7 | 46.7 |
| DEX0477_072.nt.1 | 3292.0 | 31.0 | 31.0 | 33.3 | 33.3 | 28.6 | 28.6 | 7.1 | 7.1 | 53.3 | 53.3 |
| DEX0477_072.nt.1 | 3293.0 | 27.6 | 27.6 | 33.3 | 33.3 | 21.4 | 21.4 | 7.1 | 7.1 | 46.7 | 46.7 |
| DEX0477_072.nt.2 | 3292.0 | 31.0 | 31.0 | 33.3 | 33.3 | 28.6 | 28.6 | 7.1 | 7.1 | 53.3 | 53.3 |
| DEX0477_072.nt.2 | 3293.0 | 27.6 | 27.6 | 33.3 | 33.3 | 21.4 | 21.4 | 7.1 | 7.1 | 46.7 | 46.7 |
| DEX0477_073.nt.1 | 589.0 | 48.3 | 48.3 | 33.3 | 33.3 | 64.3 | 64.3 | 35.7 | 35.7 | 60.0 | 60.0 |
| DEX0477_073.nt.1 | 590.0 | 51.7 | 51.7 | 40.0 | 40.0 | 64.3 | 64.3 | 35.7 | 35.7 | 66.7 | 66.7 |
| DEX0477_073.nt.2 | 589.0 | 48.3 | 48.3 | 33.3 | 33.3 | 64.3 | 64.3 | 35.7 | 35.7 | 60.0 | 60.0 |
| DEX0477_073.nt.2 | 590.0 | 51.7 | 51.7 | 40.0 | 40.0 | 64.3 | 64.3 | 35.7 | 35.7 | 66.7 | 66.7 |
| DEX0477_074.nt.1 | 589.0 | 48.3 | 48.3 | 33.3 | 33.3 | 64.3 | 64.3 | 35.7 | 35.7 | 60.0 | 60.0 |
| DEX0477_074.nt.1 | 590.0 | 51.7 | 51.7 | 40.0 | 40.0 | 64.3 | 64.3 | 35.7 | 35.7 | 66.7 | 66.7 |
| DEX0477_075.nt.1 | 5835.0 | 55.2 | 57.1 | 53.3 | 53.3 | 57.1 | 61.5 | 42.9 | 46.2 | 66.7 | 66.7 |
| DEX0477_075.nt.1 | 5836.0 | 51.7 | 51.7 | 46.7 | 46.7 | 57.1 | 57.1 | 35.7 | 35.7 | 66.7 | 66.7 |
| DEX0477_076.nt.1 | 1336.0 | 17.2 | 20.8 | 33.3 | 41.7 | 0.0 | 0.0 | 14.3 | 16.7 | 20.0 | 25.0 |
| DEX0477_076.nt.1 | 1337.0 | 20.7 | 25.0 | 40.0 | 50.0 | 0.0 | 0.0 | 21.4 | 25.0 | 20.0 | 25.0 |
| DEX0477_076.nt.1 | 3231.0 | 20.7 | 22.2 | 40.0 | 40.0 | 0.0 | 0.0 | 21.4 | 21.4 | 20.0 | 23.1 |
| DEX0477_076.nt.1 | 5317.0 | 31.0 | 32.1 | 60.0 | 60.0 | 0.0 | 0.0 | 35.7 | 38.5 | 26.7 | 26.7 |
| DEX0477_076.nt.1 | 5318.0 | 24.1 | 24.1 | 46.7 | 46.7 | 0.0 | 0.0 | 28.6 | 28.6 | 20.0 | 20.0 |
| DEX0477_077.nt.1 | 2136.0 | 37.9 | 47.8 | 46.7 | 58.3 | 28.6 | 36.4 | 21.4 | 27.3 | 53.3 | 66.7 |
| DEX0477_077.nt.1 | 2137.0 | 44.8 | 50.0 | 60.0 | 64.3 | 28.6 | 33.3 | 35.7 | 38.5 | 53.3 | 61.5 |
| DEX0477_078.nt.1 | 422.0 | 10.3 | 10.3 | 6.7 | 6.7 | 14.3 | 14.3 | 0.0 | 0.0 | 20.0 | 20.0 |
| DEX0477_078.nt.1 | 5481.0 | 24.1 | 26.9 | 26.7 | 28.6 | 21.4 | 25.0 | 7.1 | 8.3 | 40.0 | 42.9 |
| DEX0477_078.nt.1 | 5482.0 | 27.6 | 32.0 | 40.0 | 42.9 | 14.3 | 18.2 | 14.3 | 14.3 | 40.0 | 54.5 |
| DEX0477_078.nt.1 | 5483.0 | 17.2 | 18.5 | 20.0 | 21.4 | 14.3 | 15.4 | 7.1 | 7.1 | 26.7 | 30.8 |
| DEX0477_078.nt.1 | 5484.0 | 17.2 | 22.7 | 20.0 | 27.3 | 14.3 | 18.2 | 7.1 | 9.1 | 26.7 | 36.4 |
| DEX0477_078.nt.1 | 5538.0 | 17.2 | 25.0 | 20.0 | 27.3 | 14.3 | 22.2 | 7.1 | 11.1 | 26.7 | 36.4 |
| DEX0477_079.nt.1 | 3716.0 | 51.7 | 51.7 | 40.0 | 40.0 | 64.3 | 64.3 | 57.1 | 57.1 | 46.7 | 46.7 |
| DEX0477_079.nt.1 | 3717.0 | 44.8 | 44.8 | 33.3 | 33.3 | 57.1 | 57.1 | 42.9 | 42.9 | 46.7 | 46.7 |

[0589] TABLE 14

| | | | | | Lng | | Lng | | Lng | | Lng |
|---|---|---|---|---|---|---|---|---|---|---|---|
| | | Lng | | Lng | 550 | Lng | 550 | Lng | 550 | Lng | 550 |
| | | 550 | Lng 550 | 550 | SQ % | 550 | AD % | 550 | ST1 % | 550 | ST2, 3 % |
| | | ALL | ALL % | SQ | valid | AD | valid | ST1 | valid | ST2, 3 | valid |
| | Oligo | % up | valid | % up | up | % up | up | % up | up | % up | up |
| DEX ID | Name | n = 26 | up n = 26 | n = 12 | n = 12 | n = 14 | n = 14 | n = 11 | n = 11 | n = 15 | n = 15 |
| DEX0477_004.nt.1 | 1192.0 | 53.8 | 53.8 | 75.0 | 75.0 | 35.7 | 35.7 | 45.5 | 45.5 | 60.0 | 60.0 |
| DEX0477_004.nt.1 | 1193.0 | 65.4 | 65.4 | 83.3 | 83.3 | 50.0 | 50.0 | 72.7 | 72.7 | 60.0 | 60.0 |
| DEX0477_004.nt.1 | 1198.0 | 53.8 | 56.0 | 66.7 | 72.7 | 42.9 | 42.9 | 54.5 | 54.5 | 53.3 | 57.1 |
| DEX0477_004.nt.1 | 5491.0 | 57.7 | 57.7 | 75.0 | 75.0 | 42.9 | 42.9 | 54.5 | 54.5 | 60.0 | 60.0 |
| DEX0477_008.nt.1 | 4733.0 | 88.5 | 88.5 | 83.3 | 83.3 | 92.9 | 92.9 | 90.9 | 90.9 | 86.7 | 86.7 |
| DEX0477_008.nt.1 | 4734.0 | 88.5 | 88.5 | 83.3 | 83.3 | 92.9 | 92.9 | 90.9 | 90.9 | 86.7 | 86.7 |
| DEX0477_016.nt.1 | 37143.0 | 23.1 | 23.1 | 8.3 | 8.3 | 35.7 | 35.7 | 45.5 | 45.5 | 6.7 | 6.7 |
| DEX0477_016.nt.1 | 37143.2 | 23.1 | 23.1 | 8.3 | 8.3 | 35.7 | 35.7 | 45.5 | 45.5 | 6.7 | 6.7 |
| DEX0477_016.nt.2 | 37143.0 | 23.1 | 23.1 | 8.3 | 8.3 | 35.7 | 35.7 | 45.5 | 45.5 | 6.7 | 6.7 |
| DEX0477_016.nt.2 | 37143.2 | 23.1 | 23.1 | 8.3 | 8.3 | 35.7 | 35.7 | 45.5 | 45.5 | 6.7 | 6.7 |
| DEX0477_016.nt.4 | 37143.0 | 23.1 | 23.1 | 8.3 | 8.3 | 35.7 | 35.7 | 45.5 | 45.5 | 6.7 | 6.7 |
| DEX0477_016.nt.4 | 37143.2 | 23.1 | 23.1 | 8.3 | 8.3 | 35.7 | 35.7 | 45.5 | 45.5 | 6.7 | 6.7 |
| DEX0477_016.nt.5 | 37143.0 | 23.1 | 23.1 | 8.3 | 8.3 | 35.7 | 35.7 | 45.5 | 45.5 | 6.7 | 6.7 |
| DEX0477_016.nt.5 | 37143.2 | 23.1 | 23.1 | 8.3 | 8.3 | 35.7 | 35.7 | 45.5 | 45.5 | 6.7 | 6.7 |
| DEX0477_019.nt.1 | 41937.0 | 23.1 | 24.0 | 8.3 | 8.3 | 35.7 | 38.5 | 45.5 | 45.5 | 6.7 | 7.1 |
| DEX0477_019.nt.1 | 41938.0 | 23.1 | 23.1 | 8.3 | 8.3 | 35.7 | 35.7 | 45.5 | 45.5 | 6.7 | 6.7 |
| DEX0477_019.nt.1 | 41938.2 | 38.5 | 43.5 | 25.0 | 30.0 | 50.0 | 53.8 | 45.5 | 45.5 | 33.3 | 41.7 |
| DEX0477_019.nt.1 | 41938.3 | 38.5 | 47.6 | 25.0 | 37.5 | 50.0 | 53.8 | 45.5 | 50.0 | 33.3 | 45.5 |
| DEX0477_019.nt.1 | 41939.0 | 38.5 | 40.0 | 25.0 | 25.0 | 50.0 | 53.8 | 45.5 | 45.5 | 33.3 | 35.7 |
| DEX0477_019.nt.1 | 41940.0 | 38.5 | 43.5 | 25.0 | 27.3 | 50.0 | 58.3 | 45.5 | 45.5 | 33.3 | 41.7 |
| DEX0477_020.nt.1 | 41937.0 | 23.1 | 24.0 | 8.3 | 8.3 | 35.7 | 38.5 | 45.5 | 45.5 | 6.7 | 7.1 |
| DEX0477_020.nt.1 | 41938.0 | 23.1 | 23.1 | 8.3 | 8.3 | 35.7 | 35.7 | 45.5 | 45.5 | 6.7 | 6.7 |
| DEX0477_020.nt.1 | 41938.2 | 38.5 | 43.5 | 25.0 | 30.0 | 50.0 | 53.8 | 45.5 | 45.5 | 33.3 | 41.7 |
| DEX0477_020.nt.1 | 41938.3 | 38.5 | 47.6 | 25.0 | 37.5 | 50.0 | 53.8 | 45.5 | 50.0 | 33.3 | 45.5 |
| DEX0477_020.nt.1 | 41939.0 | 38.5 | 40.0 | 25.0 | 25.0 | 50.0 | 53.8 | 45.5 | 45.5 | 33.3 | 35.7 |
| DEX0477_020.nt.1 | 41940.0 | 38.5 | 43.5 | 25.0 | 27.3 | 50.0 | 58.3 | 45.5 | 45.5 | 33.3 | 41.7 |
| DEX0477_020.nt.2 | 41937.0 | 23.1 | 24.0 | 8.3 | 8.3 | 35.7 | 38.5 | 45.5 | 45.5 | 6.7 | 7.1 |
| DEX0477_020.nt.2 | 41938.0 | 23.1 | 23.1 | 8.3 | 8.3 | 35.7 | 35.7 | 45.5 | 45.5 | 6.7 | 6.7 |
| DEX0477_020.nt.2 | 41938.2 | 38.5 | 43.5 | 25.0 | 30.0 | 50.0 | 53.8 | 45.5 | 45.5 | 33.3 | 41.7 |
| DEX0477_020.nt.2 | 41938.3 | 38.5 | 47.6 | 25.0 | 37.5 | 50.0 | 53.8 | 45.5 | 50.0 | 33.3 | 45.5 |
| DEX0477_020.nt.2 | 41939.0 | 38.5 | 40.0 | 25.0 | 25.0 | 50.0 | 53.8 | 45.5 | 45.5 | 33.3 | 35.7 |
| DEX0477_020.nt.2 | 41940.0 | 38.5 | 43.5 | 25.0 | 27.3 | 50.0 | 58.3 | 45.5 | 45.5 | 33.3 | 41.7 |
| DEX0477_021.nt.1 | 33088.0 | 30.8 | 30.8 | 8.3 | 8.3 | 50.0 | 50.0 | 45.5 | 45.5 | 20.0 | 20.0 |
| DEX0477_021.nt.1 | 33088.2 | 30.8 | 30.8 | 8.3 | 8.3 | 50.0 | 50.0 | 45.5 | 45.5 | 20.0 | 20.0 |
| DEX0477_021.nt.1 | 41945.0 | 30.8 | 30.8 | 8.3 | 8.3 | 50.0 | 50.0 | 45.5 | 45.5 | 20.0 | 20.0 |
| DEX0477_021.nt.1 | 41946.0 | 30.8 | 30.8 | 8.3 | 8.3 | 50.0 | 50.0 | 45.5 | 45.5 | 20.0 | 20.0 |
| DEX0477_021.nt.2 | 33088.0 | 30.8 | 30.8 | 8.3 | 8.3 | 50.0 | 50.0 | 45.5 | 45.5 | 20.0 | 20.0 |
| DEX0477_021.nt.2 | 33088.2 | 30.8 | 30.8 | 8.3 | 8.3 | 50.0 | 50.0 | 45.5 | 45.5 | 20.0 | 20.0 |
| DEX0477_021.nt.2 | 41945.0 | 30.8 | 30.8 | 8.3 | 8.3 | 50.0 | 50.0 | 45.5 | 45.5 | 20.0 | 20.0 |
| DEX0477_021.nt.2 | 41946.0 | 30.8 | 30.8 | 8.3 | 8.3 | 50.0 | 50.0 | 45.5 | 45.5 | 20.0 | 20.0 |
| DEX0477_022.nt.1 | 41937.0 | 23.1 | 24.0 | 8.3 | 8.3 | 35.7 | 38.5 | 45.5 | 45.5 | 6.7 | 7.1 |
| DEX0477_022.nt.1 | 41939.0 | 38.5 | 40.0 | 25.0 | 25.0 | 50.0 | 53.8 | 45.5 | 45.5 | 33.3 | 35.7 |
| DEX0477_022.nt.1 | 41940.0 | 38.5 | 43.5 | 25.0 | 27.3 | 50.0 | 58.3 | 45.5 | 45.5 | 33.3 | 41.7 |
| DEX0477_023.nt.1 | 33088.0 | 30.8 | 30.8 | 8.3 | 8.3 | 50.0 | 50.0 | 45.5 | 45.5 | 20.0 | 20.0 |
| DEX0477_023.nt.1 | 33088.2 | 30.8 | 30.8 | 8.3 | 8.3 | 50.0 | 50.0 | 45.5 | 45.5 | 20.0 | 20.0 |
| DEX0477_024.nt.1 | 41945.0 | 30.8 | 30.8 | 8.3 | 8.3 | 50.0 | 50.0 | 45.5 | 45.5 | 20.0 | 20.0 |
| DEX0477_024.nt.1 | 41946.0 | 30.8 | 30.8 | 8.3 | 8.3 | 50.0 | 50.0 | 45.5 | 45.5 | 20.0 | 20.0 |
| DEX0477_024.nt.1 | 41945.0 | 30.8 | 30.8 | 8.3 | 8.3 | 50.0 | 50.0 | 45.5 | 45.5 | 20.0 | 20.0 |
| DEX0477_024.nt.2 | 41946.0 | 30.8 | 30.8 | 8.3 | 8.3 | 50.0 | 50.0 | 45.5 | 45.5 | 20.0 | 20.0 |
| DEX0477_024.nt.2 | 41945.0 | 30.8 | 30.8 | 8.3 | 8.3 | 50.0 | 50.0 | 45.5 | 45.5 | 20.0 | 20.0 |
| DEX0477_024.nt.3 | 41946.0 | 30.8 | 30.8 | 8.3 | 8.3 | 50.0 | 50.0 | 45.5 | 45.5 | 20.0 | 20.0 |
| DEX0477_024.nt.3 | 41945.0 | 30.8 | 30.8 | 8.3 | 8.3 | 50.0 | 50.0 | 45.5 | 45.5 | 20.0 | 20.0 |
| DEX0477_024.nt.4 | 41946.0 | 30.8 | 30.8 | 8.3 | 8.3 | 50.0 | 50.0 | 45.5 | 45.5 | 20.0 | 20.0 |
| DEX0477_024.nt.4 | 889.0 | 96.2 | 96.2 | 100.0 | 100.0 | 92.9 | 92.9 | 90.9 | 90.9 | 100.0 | 100.0 |
| DEX0477_025.nt.1 | 890.0 | 88.5 | 92.0 | 91.7 | 100.0 | 85.7 | 85.7 | 81.8 | 90.0 | 93.3 | 93.3 |
| DEX0477_033.nt.1 | 1350.0 | 23.1 | 26.1 | 33.3 | 36.4 | 14.3 | 16.7 | 18.2 | 22.2 | 26.7 | 28.6 |
| DEX0477_033.nt.1 | 1351.0 | 23.1 | 27.3 | 25.0 | 30.0 | 21.4 | 25.0 | 27.3 | 33.3 | 20.0 | 23.1 |
| DEX0477_033.nt.1 | 3410.0 | 23.1 | 27.3 | 25.0 | 33.3 | 21.4 | 23.1 | 27.3 | 33.3 | 20.0 | 23.1 |
| DEX0477_033.nt.1 | 3411.0 | 23.1 | 25.0 | 25.0 | 30.0 | 21.4 | 21.4 | 27.3 | 27.3 | 20.0 | 23.1 |
| DEX0477_033.nt.1 | 19535.0 | 23.1 | 26.1 | 25.0 | 30.0 | 21.4 | 23.1 | 27.3 | 27.3 | 20.0 | 25.0 |
| DEX0477_033.nt.1 | 19535.2 | 23.1 | 31.6 | 25.0 | 37.5 | 21.4 | 27.3 | 27.3 | 42.9 | 20.0 | 25.0 |
| DEX0477_033.nt.1 | 41957.0 | 23.1 | 24.0 | 25.0 | 27.3 | 21.4 | 21.4 | 27.3 | 27.3 | 20.0 | 21.4 |
| DEX0477_033.nt.1 | 41958.0 | 23.1 | 25.0 | 25.0 | 27.3 | 21.4 | 23.1 | 27.3 | 27.3 | 20.0 | 23.1 |
| DEX0477_033.nt.2 | 1350.0 | 23.1 | 26.1 | 33.3 | 36.4 | 14.3 | 16.7 | 18.2 | 22.2 | 26.7 | 28.6 |
| DEX0477_033.nt.2 | 1351.0 | 23.1 | 27.3 | 25.0 | 30.0 | 21.4 | 25.0 | 27.3 | 33.3 | 20.0 | 23.1 |
| DEX0477_033.nt.2 | 3410.0 | 23.1 | 27.3 | 25.0 | 33.3 | 21.4 | 23.1 | 27.3 | 33.3 | 20.0 | 23.1 |
| DEX0477_033.nt.2 | 3411.0 | 23.1 | 25.0 | 25.0 | 30.0 | 21.4 | 21.4 | 27.3 | 27.3 | 20.0 | 23.1 |
| DEX0477_033.nt.2 | 19535.0 | 23.1 | 26.1 | 25.0 | 30.0 | 21.4 | 23.1 | 27.3 | 27.3 | 20.0 | 25.0 |
| DEX0477_033.nt.2 | 19535.2 | 23.1 | 31.6 | 25.0 | 37.5 | 21.4 | 27.3 | 27.3 | 42.9 | 20.0 | 25.0 |
| DEX0477_033.nt.2 | 41957.0 | 23.1 | 24.0 | 25.0 | 27.3 | 21.4 | 21.4 | 27.3 | 27.3 | 20.0 | 21.4 |
| DEX0477_033.nt.2 | 41958.0 | 23.1 | 25.0 | 25.0 | 27.3 | 21.4 | 23.1 | 27.3 | 27.3 | 20.0 | 23.1 |
| DEX0477_033.nt.3 | 1350.0 | 23.1 | 26.1 | 33.3 | 36.4 | 14.3 | 16.7 | 18.2 | 22.2 | 26.7 | 28.6 |
| DEX0477_033.nt.3 | 1351.0 | 23.1 | 27.3 | 25.0 | 30.0 | 21.4 | 25.0 | 27.3 | 33.3 | 20.0 | 23.1 |
| DEX0477_033.nt.3 | 3410.0 | 23.1 | 27.3 | 25.0 | 33.3 | 21.4 | 23.1 | 27.3 | 33.3 | 20.0 | 23.1 |
| DEX0477_033.nt.3 | 3411.0 | 23.1 | 25.0 | 25.0 | 30.0 | 21.4 | 21.4 | 27.3 | 27.3 | 20.0 | 23.1 |
| DEX0477_033.nt.3 | 19535.0 | 23.1 | 26.1 | 25.0 | 30.0 | 21.4 | 23.1 | 27.3 | 27.3 | 20.0 | 25.0 |
| DEX0477_033.nt.3 | 19535.2 | 23.1 | 31.6 | 25.0 | 37.5 | 21.4 | 27.3 | 27.3 | 42.9 | 20.0 | 25.0 |
| DEX0477_033.nt.3 | 41957.0 | 23.1 | 24.0 | 25.0 | 27.3 | 21.4 | 21.4 | 27.3 | 27.3 | 20.0 | 21.4 |
| DEX0477_033.nt.3 | 41958.0 | 23.1 | 25.0 | 25.0 | 27.3 | 21.4 | 23.1 | 27.3 | 27.3 | 20.0 | 23.1 |
| DEX0477_036.nt.1 | 2370.0 | 57.7 | 62.5 | 75.0 | 81.8 | 42.9 | 46.2 | 45.5 | 45.5 | 66.7 | 76.9 |
| DEX0477_036.nt.1 | 2407.0 | 53.8 | 58.3 | 75.0 | 75.0 | 35.7 | 41.7 | 45.5 | 50.0 | 60.0 | 64.3 |
| DEX0477_036.nt.1 | 2443.0 | 61.5 | 64.0 | 75.0 | 75.0 | 50.0 | 53.8 | 45.5 | 45.5 | 73.3 | 78.6 |
| DEX0477_036.nt.1 | 2446.0 | 61.5 | 61.5 | 75.0 | 75.0 | 50.0 | 50.0 | 45.5 | 45.5 | 73.3 | 73.3 |
| DEX0477_038.nt.1 | 2644.0 | 84.6 | 84.6 | 91.7 | 91.7 | 78.6 | 78.6 | 72.7 | 72.7 | 93.3 | 93.3 |
| DEX0477_038.nt.2 | 2644.0 | 84.6 | 84.6 | 91.7 | 91.7 | 78.6 | 78.6 | 72.7 | 72.7 | 93.3 | 93.3 |
| DEX0477_038.nt.3 | 2644.0 | 84.6 | 84.6 | 91.7 | 91.7 | 78.6 | 78.6 | 72.7 | 72.7 | 93.3 | 93.3 |
| DEX0477_040.nt.1 | 3716.0 | 53.8 | 53.8 | 41.7 | 41.7 | 64.3 | 64.3 | 63.6 | 63.6 | 46.7 | 46.7 |
| DEX0477_040.nt.1 | 3717.0 | 50.0 | 50.0 | 41.7 | 41.7 | 57.1 | 57.1 | 54.5 | 54.5 | 46.7 | 46.7 |
| DEX0477_040.nt.2 | 3716.0 | 53.8 | 53.8 | 41.7 | 41.7 | 64.3 | 64.3 | 63.6 | 63.6 | 46.7 | 46.7 |
| DEX0477_040.nt.2 | 3717.0 | 50.0 | 50.0 | 41.7 | 41.7 | 57.1 | 57.1 | 54.5 | 54.5 | 46.7 | 46.7 |
| DEX0477_042.nt.1 | 3382.0 | 26.9 | 26.9 | 8.3 | 8.3 | 42.9 | 42.9 | 27.3 | 27.3 | 26.7 | 26.7 |
| DEX0477_043.nt.1 | 1190.0 | 30.8 | 33.3 | 50.0 | 54.5 | 14.3 | 15.4 | 36.4 | 36.4 | 26.7 | 30.8 |
| DEX0477_043.nt.1 | 1191.0 | 30.8 | 30.8 | 58.3 | 58.3 | 7.1 | 7.1 | 27.3 | 27.3 | 33.3 | 33.3 |
| DEX0477_043.nt.1 | 1234.0 | 50.0 | 50.0 | 83.3 | 83.3 | 21.4 | 21.4 | 45.5 | 45.5 | 53.3 | 53.3 |
| DEX0477_043.nt.1 | 1235.0 | 38.5 | 38.5 | 75.0 | 75.0 | 7.1 | 7.1 | 18.2 | 18.2 | 53.3 | 53.3 |
| DEX0477_046.nt.1 | 1550.0 | 3.8 | 3.8 | 0.0 | 0.0 | 7.1 | 7.1 | 9.1 | 9.1 | 0.0 | 0.0 |
| DEX0477_046.nt.1 | 1552.0 | 23.1 | 23.1 | 8.3 | 8.3 | 35.7 | 35.7 | 45.5 | 45.5 | 6.7 | 6.7 |
| DEX0477_046.nt.1 | 1553.0 | 23.1 | 23.1 | 8.3 | 8.3 | 35.7 | 35.7 | 36.4 | 36.4 | 13.3 | 13.3 |
| DEX0477_047.nt.1 | 451.0 | 46.2 | 48.0 | 75.0 | 75.0 | 21.4 | 23.1 | 36.4 | 36.4 | 53.3 | 57.1 |
| DEX0477_050.nt.1 | 1190.0 | 30.8 | 33.3 | 50.0 | 54.5 | 14.3 | 15.4 | 36.4 | 36.4 | 26.7 | 30.8 |
| DEX0477_050.nt.1 | 1191.0 | 30.8 | 30.8 | 58.3 | 58.3 | 7.1 | 7.1 | 27.3 | 27.3 | 33.3 | 33.3 |
| DEX0477_050.nt.1 | 1234.0 | 50.0 | 50.0 | 83.3 | 83.3 | 21.4 | 21.4 | 45.5 | 45.5 | 53.3 | 53.3 |
| DEX0477_050.nt.1 | 1235.0 | 38.5 | 38.5 | 75.0 | 75.0 | 7.1 | 7.1 | 18.2 | 18.2 | 53.3 | 53.3 |
| DEX0477_051.nt.1 | 1606.0 | 42.3 | 45.8 | 58.3 | 63.6 | 28.6 | 30.8 | 54.5 | 54.5 | 33.3 | 38.5 |
| DEX0477_051.nt.1 | 1607.0 | 46.2 | 46.2 | 66.7 | 66.7 | 28.6 | 28.6 | 54.5 | 54.5 | 40.0 | 40.0 |
| DEX0477_051.nt.1 | 1642.0 | 19.2 | 21.7 | 41.7 | 41.7 | 0.0 | 0.0 | 18.2 | 20.0 | 20.0 | 23.1 |
| DEX0477_051.nt.1 | 3080.0 | 61.5 | 61.5 | 83.3 | 83.3 | 42.9 | 42.9 | 72.7 | 72.7 | 53.3 | 53.3 |
| DEX0477_053.nt.1 | 1190.0 | 30.8 | 33.3 | 50.0 | 54.5 | 14.3 | 15.4 | 36.4 | 36.4 | 26.7 | 30.8 |
| DEX0477_053.nt.1 | 1191.0 | 30.8 | 30.8 | 58.3 | 58.3 | 7.1 | 7.1 | 27.3 | 27.3 | 33.3 | 33.3 |
| DEX0477_053.nt.1 | 1234.0 | 50.0 | 50.0 | 83.3 | 83.3 | 21.4 | 21.4 | 45.5 | 45.5 | 53.3 | 53.3 |
| DEX0477_053.nt.1 | 1235.0 | 38.5 | 38.5 | 75.0 | 75.0 | 7.1 | 7.1 | 18.2 | 18.2 | 53.3 | 53.3 |
| DEX0477_054.nt.1 | 9340.0 | 53.8 | 53.8 | 83.3 | 83.3 | 28.6 | 28.6 | 36.4 | 36.4 | 66.7 | 66.7 |
| DEX0477_054.nt.1 | 9340.2 | 53.8 | 53.8 | 83.3 | 83.3 | 28.6 | 28.6 | 36.4 | 36.4 | 66.7 | 66.7 |
| DEX0477_054.nt.2 | 9341.0 | 30.8 | 30.8 | 58.3 | 58.3 | 7.1 | 7.1 | 36.4 | 36.4 | 26.7 | 26.7 |
| DEX0477_054.nt.2 | 9341.2 | 30.8 | 30.8 | 58.3 | 58.3 | 7.1 | 7.1 | 36.4 | 36.4 | 26.7 | 26.7 |
| DEX0477_055.nt.1 | 1190.0 | 30.8 | 33.3 | 50.0 | 54.5 | 14.3 | 15.4 | 36.4 | 36.4 | 26.7 | 30.8 |
| DEX0477_055.nt.1 | 5605.0 | 19.2 | 21.7 | 33.3 | 36.4 | 7.1 | 8.3 | 27.3 | 30.0 | 13.3 | 15.4 |
| DEX0477_055.nt.1 | 5606.0 | 23.1 | 28.6 | 33.3 | 44.4 | 14.3 | 16.7 | 27.3 | 37.5 | 20.0 | 23.1 |
| DEX0477_055.nt.1 | 5607.0 | 34.6 | 34.6 | 58.3 | 58.3 | 14.3 | 14.3 | 36.4 | 36.4 | 33.3 | 33.3 |
| DEX0477_055.nt.1 | 5611.0 | 15.4 | 17.4 | 33.3 | 40.0 | 0.0 | 0.0 | 18.2 | 20.0 | 13.3 | 15.4 |
| DEX0477_055.nt.1 | 5624.0 | 23.1 | 35.3 | 33.3 | 50.0 | 14.3 | 22.2 | 27.3 | 42.9 | 20.0 | 30.0 |
| DEX0477_055.nt.1 | 5637.0 | 23.1 | 26.1 | 33.3 | 36.4 | 14.3 | 16.7 | 36.4 | 44.4 | 13.3 | 14.3 |
| DEX0477_055.nt.1 | 5638.0 | 23.1 | 23.1 | 33.3 | 33.3 | 14.3 | 14.3 | 36.4 | 36.4 | 13.3 | 13.3 |
| DEX0477_055.nt.1 | 5639.0 | 30.8 | 30.8 | 41.7 | 41.7 | 21.4 | 21.4 | 36.4 | 36.4 | 26.7 | 26.7 |
| DEX0477_055.nt.1 | 5640.0 | 26.9 | 26.9 | 33.3 | 33.3 | 21.4 | 21.4 | 36.4 | 36.4 | 20.0 | 20.0 |
| DEX0477_055.nt.2 | 1187.0 | 30.8 | 30.8 | 58.3 | 58.3 | 7.1 | 7.1 | 27.3 | 27.3 | 33.3 | 33.3 |
| DEX0477_055.nt.2 | 1190.0 | 30.8 | 33.3 | 50.0 | 54.5 | 14.3 | 15.4 | 36.4 | 36.4 | 26.7 | 30.8 |
| DEX0477_055.nt.2 | 5605.0 | 19.2 | 21.7 | 33.3 | 36.4 | 7.1 | 8.3 | 27.3 | 30.0 | 13.3 | 15.4 |
| DEX0477_055.nt.2 | 5606.0 | 23.1 | 28.6 | 33.3 | 44.4 | 14.3 | 16.7 | 27.3 | 37.5 | 20.0 | 23.1 |
| DEX0477_055.nt.2 | 5607.0 | 34.6 | 34.6 | 58.3 | 58.3 | 14.3 | 14.3 | 36.4 | 36.4 | 33.3 | 33.3 |
| DEX0477_055.nt.2 | 5611.0 | 15.4 | 17.4 | 33.3 | 40.0 | 0.0 | 0.0 | 18.2 | 20.0 | 13.3 | 15.4 |
| DEX0477_055.nt.2 | 5624.0 | 23.1 | 35.3 | 33.3 | 50.0 | 14.3 | 22.2 | 27.3 | 42.9 | 20.0 | 30.0 |
| DEX0477_055.nt.2 | 5637.0 | 23.1 | 26.1 | 33.3 | 36.4 | 14.3 | 16.7 | 36.4 | 44.4 | 13.3 | 14.3 |
| DEX0477_055.nt.2 | 5638.0 | 23.1 | 23.1 | 33.3 | 33.3 | 14.3 | 14.3 | 36.4 | 36.4 | 13.3 | 13.3 |
| DEX0477_055.nt.2 | 5639.0 | 30.8 | 30.8 | 41.7 | 41.7 | 21.4 | 21.4 | 36.4 | 36.4 | 26.7 | 26.7 |
| DEX0477_055.nt.2 | 5640.0 | 26.9 | 26.9 | 33.3 | 33.3 | 21.4 | 21.4 | 36.4 | 36.4 | 20.0 | 20.0 |
| DEX0477_055.nt.3 | 1187.0 | 30.8 | 30.8 | 58.3 | 58.3 | 7.1 | 7.1 | 27.3 | 27.3 | 33.3 | 33.3 |
| DEX0477_055.nt.3 | 1190.0 | 30.8 | 33.3 | 50.0 | 54.5 | 14.3 | 15.4 | 36.4 | 36.4 | 26.7 | 30.8 |
| DEX0477_055.nt.3 | 5605.0 | 19.2 | 21.7 | 33.3 | 36.4 | 7.1 | 8.3 | 27.3 | 30.0 | 13.3 | 15.4 |
| DEX0477_055.nt.3 | 5606.0 | 23.1 | 28.6 | 33.3 | 44.4 | 14.3 | 16.7 | 27.3 | 37.5 | 20.0 | 23.1 |
| DEX0477_055.nt.3 | 5607.0 | 34.6 | 34.6 | 58.3 | 58.3 | 14.3 | 14.3 | 36.4 | 36.4 | 33.3 | 33.3 |
| DEX0477_055.nt.3 | 5611.0 | 15.4 | 17.4 | 33.3 | 40.0 | 0.0 | 0.0 | 18.2 | 20.0 | 13.3 | 15.4 |
| DEX0477_055.nt.3 | 5624.0 | 23.1 | 35.3 | 33.3 | 50.0 | 14.3 | 22.2 | 27.3 | 42.9 | 20.0 | 30.0 |
| DEX0477_055.nt.3 | 5637.0 | 23.1 | 26.1 | 33.3 | 36.4 | 14.3 | 16.7 | 36.4 | 44.4 | 13.3 | 14.3 |
| DEX0477_055.nt.3 | 5638.0 | 23.1 | 23.1 | 33.3 | 33.3 | 14.3 | 14.3 | 36.4 | 36.4 | 13.3 | 13.3 |
| DEX0477_055.nt.3 | 5639.0 | 30.8 | 30.8 | 41.7 | 41.7 | 21.4 | 21.4 | 36.4 | 36.4 | 26.7 | 26.7 |
| DEX0477_055.nt.3 | 5640.0 | 26.9 | 26.9 | 33.3 | 33.3 | 21.4 | 21.4 | 36.4 | 36.4 | 20.0 | 20.0 |
| DEX0477_055.nt.4 | 1190.0 | 30.8 | 33.3 | 50.0 | 54.5 | 14.3 | 15.4 | 36.4 | 36.4 | 26.7 | 30.8 |
| DEX0477_055.nt.4 | 5605.0 | 19.2 | 21.7 | 33.3 | 36.4 | 7.1 | 8.3 | 27.3 | 30.0 | 13.3 | 15.4 |
| DEX0477_055.nt.4 | 5606.0 | 23.1 | 28.6 | 33.3 | 44.4 | 14.3 | 16.7 | 27.3 | 37.5 | 20.0 | 23.1 |
| DEX0477_055.nt.4 | 5611.0 | 15.4 | 17.4 | 33.3 | 40.0 | 0.0 | 0.0 | 18.2 | 20.0 | 13.3 | 15.4 |
| DEX0477_055.nt.4 | 5624.0 | 23.1 | 35.3 | 33.3 | 50.0 | 14.3 | 22.2 | 27.3 | 42.9 | 20.0 | 30.0 |
| DEX0477_055.nt.4 | 5639.0 | 30.8 | 30.8 | 41.7 | 41.7 | 21.4 | 21.4 | 36.4 | 36.4 | 26.7 | 26.7 |
| DEX0477_055.nt.4 | 5640.0 | 26.9 | 26.9 | 33.3 | 33.3 | 21.4 | 21.4 | 36.4 | 36.4 | 20.0 | 20.0 |
| DEX0477_056.nt.1 | 3805.0 | 26.9 | 28.0 | 50.0 | 54.5 | 7.1 | 7.1 | 27.3 | 27.3 | 26.7 | 28.6 |
| DEX0477_056.nt.1 | 3816.0 | 30.8 | 30.8 | 58.3 | 58.3 | 7.1 | 7.1 | 27.3 | 27.3 | 33.3 | 33.3 |
| DEX0477_056.nt.1 | 3817.0 | 26.9 | 26.9 | 50.0 | 50.0 | 7.1 | 7.1 | 27.3 | 27.3 | 26.7 | 26.7 |
| DEX0477_067.nt.1 | 4787.0 | 38.5 | 43.5 | 33.3 | 33.3 | 42.9 | 54.5 | 54.5 | 54.5 | 26.7 | 33.3 |
| DEX0477_067.nt.1 | 4788.0 | 38.5 | 50.0 | 33.3 | 40.0 | 42.9 | 60.0 | 54.5 | 60.0 | 26.7 | 40.0 |
| DEX0477_068.nt.1 | 4480.0 | 15.4 | 15.4 | 16.7 | 16.7 | 14.3 | 14.3 | 0.0 | 0.0 | 26.7 | 26.7 |
| DEX0477_069.nt.1 | 4893.0 | 15.4 | 26.7 | 16.7 | 33.3 | 14.3 | 22.2 | 18.2 | 25.0 | 13.3 | 28.6 |
| DEX0477_069.nt.1 | 4894.0 | 23.1 | 85.7 | 16.7 | 66.7 | 28.6 | 100.0 | 18.2 | 100.0 | 26.7 | 80.0 |
| DEX0477_070.nt.1 | 3744.0 | 15.4 | 16.0 | 25.0 | 27.3 | 7.1 | 7.1 | 18.2 | 18.2 | 13.3 | 14.3 |
| DEX0477_071.nt.1 | 4957.0 | 46.2 | 46.2 | 58.3 | 58.3 | 35.7 | 35.7 | 27.3 | 27.3 | 60.0 | 60.0 |
| DEX0477_071.nt.1 | 4958.0 | 34.6 | 34.6 | 50.0 | 50.0 | 21.4 | 21.4 | 27.3 | 27.3 | 40.0 | 40.0 |
| DEX0477_071.nt.2 | 4957.0 | 46.2 | 46.2 | 58.3 | 58.3 | 35.7 | 35.7 | 27.3 | 27.3 | 60.0 | 60.0 |
| DEX0477_071.nt.2 | 4958.0 | 34.6 | 34.6 | 50.0 | 50.0 | 21.4 | 21.4 | 27.3 | 27.3 | 40.0 | 40.0 |
| DEX0477_072.nt.1 | 3292.0 | 34.6 | 34.6 | 41.7 | 41.7 | 28.6 | 28.6 | 9.1 | 9.1 | 53.3 | 53.3 |
| DEX0477_072.nt.1 | 3293.0 | 34.6 | 36.0 | 50.0 | 50.0 | 21.4 | 23.1 | 9.1 | 9.1 | 53.3 | 57.1 |
| DEX0477_072.nt.2 | 3292.0 | 34.6 | 34.6 | 41.7 | 41.7 | 28.6 | 28.6 | 9.1 | 9.1 | 53.3 | 53.3 |
| DEX0477_072.nt.2 | 3293.0 | 34.6 | 36.0 | 50.0 | 50.0 | 21.4 | 23.1 | 9.1 | 9.1 | 53.3 | 57.1 |
| DEX0477_073.nt.1 | 589.0 | 53.8 | 53.8 | 41.7 | 41.7 | 64.3 | 64.3 | 45.5 | 45.5 | 60.0 | 60.0 |
| DEX0477_073.nt.1 | 590.0 | 57.7 | 57.7 | 50.0 | 50.0 | 64.3 | 64.3 | 45.5 | 45.5 | 66.7 | 66.7 |
| DEX0477_073.nt.2 | 589.0 | 53.8 | 53.8 | 41.7 | 41.7 | 64.3 | 64.3 | 45.5 | 45.5 | 60.0 | 60.0 |
| DEX0477_073.nt.2 | 590.0 | 57.7 | 57.7 | 50.0 | 50.0 | 64.3 | 64.3 | 45.5 | 45.5 | 66.7 | 66.7 |
| DEX0477_074.nt.1 | 589.0 | 53.8 | 53.8 | 41.7 | 41.7 | 64.3 | 64.3 | 45.5 | 45.5 | 60.0 | 60.0 |
| DEX0477_074.nt.1 | 590.0 | 57.7 | 57.7 | 50.0 | 50.0 | 64.3 | 64.3 | 45.5 | 45.5 | 66.7 | 66.7 |
| DEX0477_075.nt.1 | 5835.0 | 53.8 | 56.0 | 58.3 | 58.3 | 50.0 | 53.8 | 45.5 | 50.0 | 60.0 | 60.0 |
| DEX0477_075.nt.1 | 5836.0 | 57.7 | 57.7 | 58.3 | 58.3 | 57.1 | 57.1 | 45.5 | 45.5 | 66.7 | 66.7 |
| DEX0477_076.nt.1 | 1336.0 | 11.5 | 20.0 | 25.0 | 33.3 | 0.0 | 0.0 | 0.0 | 0.0 | 20.0 | 30.0 |
| DEX0477_076.nt.1 | 1337.0 | 15.4 | 25.0 | 33.3 | 50.0 | 0.0 | 0.0 | 9.1 | 14.3 | 20.0 | 33.3 |
| DEX0477_076.nt.1 | 1355.0 | 3.8 | 33.3 | 8.3 | 33.3 | 0.0 | 0.0 | 0.0 | 0.0 | 6.7 | 33.3 |
| DEX0477_076.nt.1 | 1378.0 | 11.5 | 15.8 | 25.0 | 30.0 | 0.0 | 0.0 | 0.0 | 0.0 | 20.0 | 30.0 |
| DEX0477_076.nt.1 | 1379.0 | 3.8 | 5.6 | 8.3 | 11.1 | 0.0 | 0.0 | 0.0 | 0.0 | 6.7 | 10.0 |
| DEX0477_076.nt.1 | 1382.0 | 0.0 | 0.0 | 0.0 | 0.0 | 0.0 | 0.0 | 0.0 | 0.0 | 0.0 | 0.0 |
| DEX0477_076.nt.1 | 3231.0 | 15.4 | 19.0 | 33.3 | 44.4 | 0.0 | 0.0 | 9.1 | 11.1 | 20.0 | 25.0 |
| DEX0477_076.nt.1 | 5317.0 | 23.1 | 24.0 | 50.0 | 50.0 | 0.0 | 0.0 | 18.2 | 20.0 | 26.7 | 26.7 |
| DEX0477_076.nt.1 | 5318.0 | 15.4 | 15.4 | 33.3 | 33.3 | 0.0 | 0.0 | 9.1 | 9.1 | 20.0 | 20.0 |
| DEX0477_077.nt.1 | 2136.0 | 42.3 | 52.4 | 58.3 | 70.0 | 28.6 | 36.4 | 27.3 | 30.0 | 53.3 | 72.7 |
| DEX0477_077.nt.1 | 2137.0 | 46.2 | 57.1 | 66.7 | 80.0 | 28.6 | 36.4 | 27.3 | 33.3 | 60.0 | 75.0 |
| DEX0477_078.nt.1 | 422.0 | 11.5 | 11.5 | 16.7 | 16.7 | 7.1 | 7.1 | 0.0 | 0.0 | 20.0 | 20.0 |
| DEX0477_078.nt.1 | 5481.0 | 30.8 | 38.1 | 50.0 | 60.0 | 14.3 | 18.2 | 9.1 | 11.1 | 46.7 | 58.3 |
| DEX0477_078.nt.1 | 5482.0 | 30.8 | 44.4 | 50.0 | 66.7 | 14.3 | 22.2 | 18.2 | 25.0 | 40.0 | 60.0 |
| DEX0477_078.nt.1 | 5483.0 | 19.2 | 25.0 | 25.0 | 33.3 | 14.3 | 18.2 | 9.1 | 12.5 | 26.7 | 33.3 |
| DEX0477_078.nt.1 | 5484.0 | 26.9 | 41.2 | 33.3 | 50.0 | 21.4 | 33.3 | 9.1 | 14.3 | 40.0 | 60.0 |
| DEX0477_078.nt.1 | 5538.0 | 11.5 | 33.3 | 16.7 | 40.0 | 7.1 | 25.0 | 0.0 | 0.0 | 20.0 | 50.0 |
| DEX0477_079.nt.1 | 3716.0 | 53.8 | 53.8 | 41.7 | 41.7 | 64.3 | 64.3 | 63.6 | 63.6 | 46.7 | 46.7 |
| DEX0477_079.nt.1 | 3717.0 | 50.0 | 50.0 | 41.7 | 41.7 | 57.1 | 57.1 | 54.5 | 54.5 | 46.7 | 46.7 |

[0590] TABLE 15

| | | Lng Cell | Lng Cell | | |
|---|---|---|---|---|---|
| | | Lines | Lines | Lng Cell | Lng Cell |
| | Oligo | % up | % valid up | Lines 550 | Lines 550 |
| DEX ID | Name | n = 5 | n = 5 | % up n = 5 | % valid up n = 5 |
| DEX0477_008.nt.1 | 4733.0 | 20.0 | 100.0 | 20.0 | 100.0 |
| DEX0477_008.nt.1 | 4734.0 | 20.0 | 25.0 | 20.0 | 33.3 |
| DEX0477_015.nt.1 | 4909.0 | 20.0 | 20.0 | 20.0 | 33.3 |
| DEX0477_015.nt.1 | 4910.0 | 20.0 | 20.0 | 20.0 | 20.0 |
| DEX0477_015.nt.2 | 2084.0 | 20.0 | 20.0 | 20.0 | 20.0 |
| DEX0477_015.nt.2 | 4909.0 | 20.0 | 20.0 | 20.0 | 33.3 |
| DEX0477_021.nt.1 | 33088.0 | 20.0 | 25.0 | 20.0 | 33.3 |
| DEX0477_021.nt.1 | 33088.2 | 20.0 | 25.0 | 20.0 | 33.3 |
| DEX0477_021.nt.1 | 41945.0 | 20.0 | 25.0 | 20.0 | 33.3 |
| DEX0477_021.nt.1 | 41946.0 | 20.0 | 25.0 | 20.0 | 33.3 |
| DEX0477_021.nt.2 | 33088.0 | 20.0 | 25.0 | 20.0 | 33.3 |
| DEX0477_021.nt.2 | 33088.2 | 20.0 | 25.0 | 20.0 | 33.3 |
| DEX0477_021.nt.2 | 41945.0 | 20.0 | 25.0 | 20.0 | 33.3 |
| DEX0477_021.nt.2 | 41946.0 | 20.0 | 25.0 | 20.0 | 33.3 |
| DEX0477_022.nt.1 | 41937.0 | 20.0 | 20.0 | 20.0 | 20.0 |
| DEX0477_022.nt.1 | 41939.0 | 0.0 | 0.0 | 0.0 | 0.0 |
| DEX0477_022.nt.1 | 41940.0 | 0.0 | 0.0 | 0.0 | 0.0 |
| DEX0477_023.nt.1 | 33088.0 | 20.0 | 25.0 | 20.0 | 33.3 |
| DEX0477_023.nt.1 | 33088.2 | 20.0 | 25.0 | 20.0 | 33.3 |
| DEX0477_024.nt.1 | 41945.0 | 20.0 | 25.0 | 20.0 | 33.3 |
| DEX0477_024.nt.1 | 41946.0 | 20.0 | 25.0 | 20.0 | 33.3 |
| DEX0477_024.nt.2 | 41945.0 | 20.0 | 25.0 | 20.0 | 33.3 |
| DEX0477_024.nt.2 | 41946.0 | 20.0 | 25.0 | 20.0 | 33.3 |
| DEX0477_024.nt.3 | 41945.0 | 20.0 | 25.0 | 20.0 | 33.3 |
| DEX0477_024.nt.3 | 41946.0 | 20.0 | 25.0 | 20.0 | 33.3 |
| DEX0477_024.nt.4 | 41945.0 | 20.0 | 25.0 | 20.0 | 33.3 |
| DEX0477_024.nt.4 | 41946.0 | 20.0 | 25.0 | 20.0 | 33.3 |
| DEX0477_025.nt.1 | 889.0 | 60.0 | 100.0 | 60.0 | 100.0 |
| DEX0477_025.nt.1 | 890.0 | 60.0 | 100.0 | 60.0 | 100.0 |
| DEX0477_033.nt.1 | 1350.0 | 20.0 | 25.0 | 20.0 | 33.3 |
| DEX0477_033.nt.1 | 1351.0 | 40.0 | 50.0 | 20.0 | 33.3 |
| DEX0477_033.nt.1 | 3410.0 | 40.0 | 50.0 | 40.0 | 66.7 |
| DEX0477_033.nt.1 | 3411.0 | 20.0 | 25.0 | 20.0 | 33.3 |
| DEX0477_033.nt.1 | 19535.0 | 40.0 | 50.0 | 40.0 | 66.7 |
| DEX0477_033.nt.1 | 19535.2 | 40.0 | 66.7 | 40.0 | 66.7 |
| DEX0477_033.nt.1 | 41957.0 | 40.0 | 50.0 | 40.0 | 66.7 |
| DEX0477_033.nt.1 | 41958.0 | 40.0 | 50.0 | 40.0 | 66.7 |
| DEX0477_033.nt.2 | 1350.0 | 20.0 | 25.0 | 20.0 | 33.3 |
| DEX0477_033.nt.2 | 1351.0 | 40.0 | 50.0 | 20.0 | 33.3 |
| DEX0477_033.nt.2 | 3410.0 | 40.0 | 50.0 | 40.0 | 66.7 |
| DEX0477_033.nt.2 | 3411.0 | 20.0 | 25.0 | 20.0 | 33.3 |
| DEX0477_033.nt.2 | 19535.0 | 40.0 | 50.0 | 40.0 | 66.7 |
| DEX0477_033.nt.2 | 19535.2 | 40.0 | 66.7 | 40.0 | 66.7 |
| DEX0477_033.nt.2 | 41957.0 | 40.0 | 50.0 | 40.0 | 66.7 |
| DEX0477_033.nt.2 | 41958.0 | 40.0 | 50.0 | 40.0 | 66.7 |
| DEX0477_033.nt.3 | 1350.0 | 20.0 | 25.0 | 20.0 | 33.3 |
| DEX0477_033.nt.3 | 1351.0 | 40.0 | 50.0 | 20.0 | 33.3 |
| DEX0477_033.nt.3 | 3410.0 | 40.0 | 50.0 | 40.0 | 66.7 |
| DEX0477_033.nt.3 | 3411.0 | 20.0 | 25.0 | 20.0 | 33.3 |
| DEX0477_033.nt.3 | 19535.0 | 40.0 | 50.0 | 40.0 | 66.7 |
| DEX0477_033.nt.3 | 19535.2 | 40.0 | 66.7 | 40.0 | 66.7 |
| DEX0477_033.nt.3 | 41957.0 | 40.0 | 50.0 | 40.0 | 66.7 |
| DEX0477_033.nt.3 | 41958.0 | 40.0 | 50.0 | 40.0 | 66.7 |
| DEX0477_038.nt.1 | 2644.0 | 60.0 | 100.0 | 60.0 | 100.0 |
| DEX0477_038.nt.2 | 2644.0 | 60.0 | 100.0 | 60.0 | 100.0 |
| DEX0477_038.nt.3 | 2644.0 | 60.0 | 100.0 | 60.0 | 100.0 |
| DEX0477_040.nt.1 | 3716.0 | 60.0 | 60.0 | 60.0 | 60.0 |
| DEX0477_040.nt.1 | 3717.0 | 60.0 | 60.0 | 60.0 | 60.0 |
| DEX0477_040.nt.2 | 3716.0 | 60.0 | 60.0 | 60.0 | 60.0 |
| DEX0477_040.nt.2 | 3717.0 | 60.0 | 60.0 | 60.0 | 60.0 |
| DEX0477_042.nt.1 | 3382.0 | 20.0 | 25.0 | 20.0 | 33.3 |
| DEX0477_043.nt.1 | 1190.0 | 20.0 | 33.3 | 20.0 | 33.3 |
| DEX0477_043.nt.1 | 1191.0 | 0.0 | 0.0 | 0.0 | 0.0 |
| DEX0477_043.nt.1 | 1234.0 | 40.0 | 40.0 | 60.0 | 60.0 |
| DEX0477_043.nt.1 | 1235.0 | 40.0 | 40.0 | 40.0 | 50.0 |
| DEX0477_050.nt.1 | 1190.0 | 20.0 | 33.3 | 20.0 | 33.3 |
| DEX0477_050.nt.1 | 1191.0 | 0.0 | 0.0 | 0.0 | 0.0 |
| DEX0477_050.nt.1 | 1234.0 | 40.0 | 40.0 | 60.0 | 60.0 |
| DEX0477_050.nt.1 | 1235.0 | 40.0 | 40.0 | 40.0 | 50.0 |
| DEX0477_051.nt.1 | 1606.0 | 0.0 | 0.0 | 0.0 | 0.0 |
| DEX0477_051.nt.1 | 1607.0 | 0.0 | 0.0 | 0.0 | 0.0 |
| DEX0477_051.nt.1 | 1642.0 | 0.0 | 0.0 | 0.0 | 0.0 |
| DEX0477_051.nt.1 | 3080.0 | 0.0 | 0.0 | 20.0 | 25.0 |
| DEX0477_053.nt.1 | 1190.0 | 20.0 | 33.3 | 20.0 | 33.3 |
| DEX0477_053.nt.1 | 1191.0 | 0.0 | 0.0 | 0.0 | 0.0 |
| DEX0477_053.nt.1 | 1234.0 | 40.0 | 40.0 | 60.0 | 60.0 |
| DEX0477_053.nt.1 | 1235.0 | 40.0 | 40.0 | 40.0 | 50.0 |
| DEX0477_054.nt.1 | 9340.0 | 60.0 | 60.0 | 60.0 | 60.0 |
| DEX0477_054.nt.1 | 9340.2 | 60.0 | 60.0 | 60.0 | 60.0 |
| DEX0477_054.nt.2 | 9341.0 | 60.0 | 60.0 | 60.0 | 60.0 |
| DEX0477_054.nt.2 | 9341.2 | 80.0 | 80.0 | 80.0 | 80.0 |
| DEX0477_055.nt.1 | 1190.0 | 20.0 | 33.3 | 20.0 | 33.3 |
| DEX0477_055.nt.1 | 5607.0 | 20.0 | 25.0 | 20.0 | 33.3 |
| DEX0477_055.nt.2 | 1190.0 | 20.0 | 33.3 | 20.0 | 33.3 |
| DEX0477_055.nt.2 | 5605.0 | 0.0 | 0.0 | 0.0 | 0.0 |
| DEX0477_055.nt.2 | 5606.0 | 0.0 | 0.0 | 0.0 | 0.0 |
| DEX0477_055.nt.2 | 5607.0 | 20.0 | 25.0 | 20.0 | 33.3 |
| DEX0477_055.nt.3 | 1190.0 | 20.0 | 33.3 | 20.0 | 33.3 |
| DEX0477_055.nt.3 | 5605.0 | 0.0 | 0.0 | 0.0 | 0.0 |
| DEX0477_055.nt.3 | 5606.0 | 0.0 | 0.0 | 0.0 | 0.0 |
| DEX0477_055.nt.3 | 5607.0 | 20.0 | 25.0 | 20.0 | 33.3 |
| DEX0477_055.nt.4 | 1190.0 | 20.0 | 33.3 | 20.0 | 33.3 |
| DEX0477_056.nt.1 | 3817.0 | 0.0 | 0.0 | 20.0 | 33.3 |
| DEX0477_067.nt.1 | 4787.0 | 20.0 | 33.3 | 20.0 | 33.3 |
| DEX0477_067.nt.1 | 4788.0 | 20.0 | 50.0 | 20.0 | 100.0 |
| DEX0477_068.nt.1 | 4480.0 | 20.0 | 20.0 | 20.0 | 20.0 |
| DEX0477_069.nt.1 | 4893.0 | 20.0 | 25.0 | 20.0 | 50.0 |
| DEX0477_069.nt.1 | 4894.0 | 20.0 | 100.0 | 20.0 | 100.0 |
| DEX0477_070.nt.1 | 3744.0 | 20.0 | 20.0 | 20.0 | 20.0 |
| DEX0477_071.nt.1 | 4957.0 | 40.0 | 40.0 | 40.0 | 40.0 |
| DEX0477_071.nt.1 | 4958.0 | 20.0 | 20.0 | 40.0 | 40.0 |
| DEX0477_071.nt.2 | 4957.0 | 40.0 | 40.0 | 40.0 | 40.0 |
| DEX0477_071.nt.2 | 4958.0 | 20.0 | 20.0 | 40.0 | 40.0 |
| DEX0477_076.nt.1 | 1336.0 | 0.0 | 0.0 | 20.0 | 100.0 |
| DEX0477_076.nt.1 | 1337.0 | 20.0 | 33.3 | 20.0 | 100.0 |
| DEX0477_076.nt.1 | 1354.0 | 0.0 | 0.0 | 0.0 | 0.0 |
| DEX0477_076.nt.1 | 1355.0 | 20.0 | 100.0 | 20.0 | 100.0 |
| DEX0477_076.nt.1 | 1378.0 | 20.0 | 33.3 | 20.0 | 33.3 |
| DEX0477_076.nt.1 | 1379.0 | 0.0 | 0.0 | 0.0 | 0.0 |
| DEX0477_076.nt.1 | 1382.0 | 0.0 | 0.0 | 0.0 | 0.0 |
| DEX0477_076.nt.1 | 3231.0 | 20.0 | 33.3 | 20.0 | 50.0 |
| DEX0477_076.nt.1 | 5317.0 | 20.0 | 25.0 | 20.0 | 25.0 |
| DEX0477_076.nt.1 | 5318.0 | 20.0 | 25.0 | 20.0 | 25.0 |
| DEX0477_079.nt.1 | 3716.0 | 60.0 | 60.0 | 60.0 | 60.0 |
| DEX0477_079.nt.1 | 3717.0 | 60.0 | 60.0 | 60.0 | 60.0 |

[0591] TABLE 16

| | | | Lng | | Lng | | |
|---|---|---|---|---|---|---|---|
| | | | Multi- | | Multi- | | |
| | | Lng | Can | Lng | Can | Lng | |
| | | Multi- | ALL % | Multi- | SQ % | Multi- | Lng Multi- |
| | | Can ALL | valid | Can SQ | valid | Can AD | Can AD |
| | Oligo | % up | up | % up | up | % up | % valid up |
| DEX ID | Name | n = 22 | n = 22 | n = 10 | n = 10 | n = 12 | n = 12 |
| DEX0477_004.nt.1 | 1200.0 | 45.5 | 55.6 | 60.0 | 75.0 | 33.3 | 40.0 |
| DEX0477_004.nt.1 | 1201.0 | 45.5 | 62.5 | 50.0 | 83.3 | 41.7 | 50.0 |
| DEX0477_008.nt.1 | 4733.0 | 95.5 | 95.5 | 100.0 | 100.0 | 91.7 | 91.7 |
| DEX0477_008.nt.1 | 4733.1 | 95.5 | 95.5 | 100.0 | 100.0 | 91.7 | 91.7 |
| DEX0477_008.nt.1 | 4734.0 | 27.3 | 100.0 | 20.0 | 100.0 | 33.3 | 100.0 |
| DEX0477_008.nt.1 | 4734.1 | 95.5 | 95.5 | 100.0 | 100.0 | 91.7 | 91.7 |
| DEX0477_009.nt.1 | 990.0 | 50.0 | 50.0 | 40.0 | 40.0 | 58.3 | 58.3 |
| DEX0477_016.nt.1 | 33428.0 | 27.3 | 27.3 | 10.0 | 10.0 | 41.7 | 41.7 |
| DEX0477_016.nt.1 | 33428.1 | 27.3 | 28.6 | 10.0 | 10.0 | 41.7 | 45.5 |
| DEX0477_016.nt.1 | 33429.0 | 0.0 | 0.0 | 0.0 | 0.0 | 0.0 | 0.0 |
| DEX0477_016.nt.1 | 33429.1 | 22.7 | 22.7 | 10.0 | 10.0 | 33.3 | 33.3 |
| DEX0477_016.nt.1 | 37143.0 | 22.7 | 22.7 | 10.0 | 10.0 | 33.3 | 33.3 |
| DEX0477_016.nt.1 | 37143.1 | 27.3 | 27.3 | 10.0 | 10.0 | 41.7 | 41.7 |
| DEX0477_016.nt.1 | 37143.2 | 27.3 | 28.6 | 10.0 | 11.1 | 41.7 | 41.7 |
| DEX0477_016.nt.1 | 37143.3 | 27.3 | 27.3 | 10.0 | 10.0 | 41.7 | 41.7 |
| DEX0477_016.nt.1 | 37143.4 | 22.7 | 22.7 | 10.0 | 10.0 | 33.3 | 33.3 |
| DEX0477_016.nt.1 | 39533.0 | 27.3 | 27.3 | 10.0 | 10.0 | 41.7 | 41.7 |
| DEX0477_016.nt.1 | 39533.1 | 27.3 | 27.3 | 10.0 | 10.0 | 41.7 | 41.7 |
| DEX0477_016.nt.1 | 39534.0 | 22.7 | 22.7 | 10.0 | 10.0 | 33.3 | 33.3 |
| DEX0477_016.nt.1 | 39534.1 | 27.3 | 27.3 | 10.0 | 10.0 | 41.7 | 41.7 |
| DEX0477_016.nt.2 | 33428.0 | 27.3 | 27.3 | 10.0 | 10.0 | 41.7 | 41.7 |
| DEX0477_016.nt.2 | 33428.1 | 27.3 | 28.6 | 10.0 | 10.0 | 41.7 | 45.5 |
| DEX0477_016.nt.2 | 33429.0 | 0.0 | 0.0 | 0.0 | 0.0 | 0.0 | 0.0 |
| DEX0477_016.nt.2 | 33429.1 | 22.7 | 22.7 | 10.0 | 10.0 | 33.3 | 33.3 |
| DEX0477_016.nt.2 | 37143.0 | 22.7 | 22.7 | 10.0 | 10.0 | 33.3 | 33.3 |
| DEX0477_016.nt.2 | 37143.1 | 27.3 | 27.3 | 10.0 | 10.0 | 41.7 | 41.7 |
| DEX0477_016.nt.2 | 37143.2 | 27.3 | 28.6 | 10.0 | 11.1 | 41.7 | 41.7 |
| DEX0477_016.nt.2 | 37143.3 | 27.3 | 27.3 | 10.0 | 10.0 | 41.7 | 41.7 |
| DEX0477_016.nt.2 | 37143.4 | 22.7 | 22.7 | 10.0 | 10.0 | 33.3 | 33.3 |
| DEX0477_016.nt.2 | 39533.0 | 27.3 | 27.3 | 10.0 | 10.0 | 41.7 | 41.7 |
| DEX0477_016.nt.2 | 39533.1 | 27.3 | 27.3 | 10.0 | 10.0 | 41.7 | 41.7 |
| DEX0477_016.nt.2 | 39534.0 | 22.7 | 22.7 | 10.0 | 10.0 | 33.3 | 33.3 |
| DEX0477_016.nt.2 | 39534.1 | 27.3 | 27.3 | 10.0 | 10.0 | 41.7 | 41.7 |
| DEX0477_016.nt.4 | 33428.0 | 27.3 | 27.3 | 10.0 | 10.0 | 41.7 | 41.7 |
| DEX0477_016.nt.4 | 33428.1 | 27.3 | 28.6 | 10.0 | 10.0 | 41.7 | 45.5 |
| DEX0477_016.nt.4 | 33429.0 | 0.0 | 0.0 | 0.0 | 0.0 | 0.0 | 0.0 |
| DEX0477_016.nt.4 | 33429.1 | 22.7 | 22.7 | 10.0 | 10.0 | 33.3 | 33.3 |
| DEX0477_016.nt.4 | 37143.0 | 22.7 | 22.7 | 10.0 | 10.0 | 33.3 | 33.3 |
| DEX0477_016.nt.4 | 37143.1 | 27.3 | 27.3 | 10.0 | 10.0 | 41.7 | 41.7 |
| DEX0477_016.nt.4 | 37143.2 | 27.3 | 28.6 | 10.0 | 11.1 | 41.7 | 41.7 |
| DEX0477_016.nt.4 | 37143.3 | 27.3 | 27.3 | 10.0 | 10.0 | 41.7 | 41.7 |
| DEX0477_016.nt.4 | 37143.4 | 22.7 | 22.7 | 10.0 | 10.0 | 33.3 | 33.3 |
| DEX0477_016.nt.4 | 39533.0 | 27.3 | 27.3 | 10.0 | 10.0 | 41.7 | 41.7 |
| DEX0477_016.nt.4 | 39533.1 | 27.3 | 27.3 | 10.0 | 10.0 | 41.7 | 41.7 |
| DEX0477_016.nt.4 | 39534.0 | 22.7 | 22.7 | 10.0 | 10.0 | 33.3 | 33.3 |
| DEX0477_016.nt.4 | 39534.1 | 27.3 | 27.3 | 10.0 | 10.0 | 41.7 | 41.7 |
| DEX0477_016.nt.5 | 33428.0 | 27.3 | 27.3 | 10.0 | 10.0 | 41.7 | 41.7 |
| DEX0477_016.nt.5 | 33428.1 | 27.3 | 28.6 | 10.0 | 10.0 | 41.7 | 45.5 |
| DEX0477_016.nt.5 | 33429.0 | 0.0 | 0.0 | 0.0 | 0.0 | 0.0 | 0.0 |
| DEX0477_016.nt.5 | 33429.1 | 22.7 | 22.7 | 10.0 | 10.0 | 33.3 | 33.3 |
| DEX0477_016.nt.5 | 37143.0 | 22.7 | 22.7 | 10.0 | 10.0 | 33.3 | 33.3 |
| DEX0477_016.nt.5 | 37143.1 | 27.3 | 27.3 | 10.0 | 10.0 | 41.7 | 41.7 |
| DEX0477_016.nt.5 | 37143.2 | 27.3 | 28.6 | 10.0 | 11.1 | 41.7 | 41.7 |
| DEX0477_016.nt.5 | 37143.3 | 27.3 | 27.3 | 10.0 | 10.0 | 41.7 | 41.7 |
| DEX0477_016.nt.5 | 37143.4 | 22.7 | 22.7 | 10.0 | 10.0 | 33.3 | 33.3 |
| DEX0477_016.nt.5 | 39533.0 | 27.3 | 27.3 | 10.0 | 10.0 | 41.7 | 41.7 |
| DEX0477_016.nt.5 | 39533.1 | 27.3 | 27.3 | 10.0 | 10.0 | 41.7 | 41.7 |
| DEX0477_016.nt.5 | 39534.0 | 22.7 | 22.7 | 10.0 | 10.0 | 33.3 | 33.3 |
| DEX0477_016.nt.5 | 39534.1 | 27.3 | 27.3 | 10.0 | 10.0 | 41.7 | 41.7 |
| DEX0477_018.nt.1 | 102557.0 | 4.5 | 4.5 | 0.0 | 0.0 | 8.3 | 8.3 |
| DEX0477_018.nt.1 | 102557.1 | 0.0 | 0.0 | 0.0 | 0.0 | 0.0 | 0.0 |
| DEX0477_018.nt.1 | 102558.0 | 4.5 | 4.5 | 0.0 | 0.0 | 8.3 | 8.3 |
| DEX0477_018.nt.1 | 102558.1 | 4.5 | 4.8 | 0.0 | 0.0 | 8.3 | 9.1 |
| DEX0477_019.nt.1 | 41937.0 | 45.5 | 52.6 | 40.0 | 44.4 | 50.0 | 60.0 |
| DEX0477_019.nt.1 | 41937.1 | 45.5 | 55.6 | 40.0 | 50.0 | 50.0 | 60.0 |
| DEX0477_019.nt.1 | 41937.2 | 45.5 | 55.6 | 40.0 | 50.0 | 50.0 | 60.0 |
| DEX0477_019.nt.1 | 41938.0 | 45.5 | 47.6 | 40.0 | 44.4 | 50.0 | 50.0 |
| DEX0477_019.nt.1 | 41938.1 | 45.5 | 45.5 | 40.0 | 40.0 | 50.0 | 50.0 |
| DEX0477_019.nt.1 | 41938.2 | 50.0 | 57.9 | 50.0 | 62.5 | 50.0 | 54.5 |
| DEX0477_019.nt.1 | 41939.0 | 45.5 | 45.5 | 40.0 | 40.0 | 50.0 | 50.0 |
| DEX0477_019.nt.1 | 41939.1 | 45.5 | 45.5 | 40.0 | 40.0 | 50.0 | 50.0 |
| DEX0477_019.nt.1 | 41939.2 | 45.5 | 47.6 | 40.0 | 40.0 | 50.0 | 54.5 |
| DEX0477_019.nt.1 | 41940.0 | 45.5 | 45.5 | 40.0 | 40.0 | 50.0 | 50.0 |
| DEX0477_019.nt.1 | 41940.1 | 45.5 | 45.5 | 40.0 | 40.0 | 50.0 | 50.0 |
| DEX0477_019.nt.1 | 41940.2 | 45.5 | 45.5 | 40.0 | 40.0 | 50.0 | 50.0 |
| DEX0477_019.nt.1 | 78627.0 | 45.5 | 62.5 | 40.0 | 50.0 | 50.0 | 75.0 |
| DEX0477_019.nt.1 | 78627.1 | 45.5 | 66.7 | 40.0 | 57.1 | 50.0 | 75.0 |
| DEX0477_019.nt.1 | 78628.0 | 40.9 | 69.2 | 30.0 | 60.0 | 50.0 | 75.0 |
| DEX0477_019.nt.1 | 78628.1 | 45.5 | 71.4 | 40.0 | 66.7 | 50.0 | 75.0 |
| DEX0477_019.nt.1 | 94127.0 | 31.8 | 46.7 | 20.0 | 40.0 | 41.7 | 50.0 |
| DEX0477_019.nt.1 | 94127.1 | 45.5 | 52.6 | 40.0 | 44.4 | 50.0 | 60.0 |
| DEX0477_019.nt.1 | 94128.0 | 50.0 | 50.0 | 50.0 | 50.0 | 50.0 | 50.0 |
| DEX0477_019.nt.1 | 94128.1 | 50.0 | 57.9 | 50.0 | 50.0 | 50.0 | 66.7 |
| DEX0477_019.nt.1 | 102785.0 | 45.5 | 52.6 | 40.0 | 44.4 | 50.0 | 60.0 |
| DEX0477_019.nt.1 | 102785.1 | 45.5 | 52.6 | 40.0 | 44.4 | 50.0 | 60.0 |
| DEX0477_019.nt.1 | 102786.0 | 50.0 | 50.0 | 50.0 | 50.0 | 50.0 | 50.0 |
| DEX0477_019.nt.1 | 102786.1 | 50.0 | 52.4 | 50.0 | 50.0 | 50.0 | 54.5 |
| DEX0477_019.nt.1 | 102787.0 | 50.0 | 50.0 | 50.0 | 50.0 | 50.0 | 50.0 |
| DEX0477_019.nt.1 | 102787.1 | 50.0 | 50.0 | 50.0 | 50.0 | 50.0 | 50.0 |
| DEX0477_019.nt.1 | 102789.0 | 45.5 | 50.0 | 40.0 | 50.0 | 50.0 | 50.0 |
| DEX0477_019.nt.1 | 102789.1 | 45.5 | 47.6 | 40.0 | 44.4 | 50.0 | 50.0 |
| DEX0477_020.nt.1 | 41937.0 | 45.5 | 52.6 | 40.0 | 44.4 | 50.0 | 60.0 |
| DEX0477_020.nt.1 | 41937.1 | 45.5 | 55.6 | 40.0 | 50.0 | 50.0 | 60.0 |
| DEX0477_020.nt.1 | 41937.2 | 45.5 | 55.6 | 40.0 | 50.0 | 50.0 | 60.0 |
| DEX0477_020.nt.1 | 41938.0 | 45.5 | 47.6 | 40.0 | 44.4 | 50.0 | 50.0 |
| DEX0477_020.nt.1 | 41938.1 | 45.5 | 45.5 | 40.0 | 40.0 | 50.0 | 50.0 |
| DEX0477_020.nt.1 | 41938.2 | 50.0 | 57.9 | 50.0 | 62.5 | 50.0 | 54.5 |
| DEX0477_020.nt.1 | 41939.0 | 45.5 | 45.5 | 40.0 | 40.0 | 50.0 | 50.0 |
| DEX0477_020.nt.1 | 41939.1 | 45.5 | 45.5 | 40.0 | 40.0 | 50.0 | 50.0 |
| DEX0477_020.nt.1 | 41939.2 | 45.5 | 47.6 | 40.0 | 40.0 | 50.0 | 54.5 |
| DEX0477_020.nt.1 | 41940.0 | 45.5 | 45.5 | 40.0 | 40.0 | 50.0 | 50.0 |
| DEX0477_020.nt.1 | 41940.1 | 45.5 | 45.5 | 40.0 | 40.0 | 50.0 | 50.0 |
| DEX0477_020.nt.1 | 41940.2 | 45.5 | 45.5 | 40.0 | 40.0 | 50.0 | 50.0 |
| DEX0477_020.nt.1 | 78627.0 | 45.5 | 62.5 | 40.0 | 50.0 | 50.0 | 75.0 |
| DEX0477_020.nt.1 | 78627.1 | 45.5 | 66.7 | 40.0 | 57.1 | 50.0 | 75.0 |
| DEX0477_020.nt.1 | 78628.0 | 40.9 | 69.2 | 30.0 | 60.0 | 50.0 | 75.0 |
| DEX0477_020.nt.1 | 78628.1 | 45.5 | 71.4 | 40.0 | 66.7 | 50.0 | 75.0 |
| DEX0477_020.nt.1 | 94128.0 | 50.0 | 50.0 | 50.0 | 50.0 | 50.0 | 50.0 |
| DEX0477_020.nt.1 | 94128.1 | 50.0 | 57.9 | 50.0 | 50.0 | 50.0 | 66.7 |
| DEX0477_020.nt.1 | 102786.0 | 50.0 | 50.0 | 50.0 | 50.0 | 50.0 | 50.0 |
| DEX0477_020.nt.1 | 102786.1 | 50.0 | 52.4 | 50.0 | 50.0 | 50.0 | 54.5 |
| DEX0477_020.nt.1 | 102787.0 | 50.0 | 50.0 | 50.0 | 50.0 | 50.0 | 50.0 |
| DEX0477_020.nt.1 | 102787.1 | 50.0 | 50.0 | 50.0 | 50.0 | 50.0 | 50.0 |
| DEX0477_020.nt.1 | 102789.0 | 45.5 | 50.0 | 40.0 | 50.0 | 50.0 | 50.0 |
| DEX0477_020.nt.1 | 102789.1 | 45.5 | 47.6 | 40.0 | 44.4 | 50.0 | 50.0 |
| DEX0477_020.nt.2 | 41937.0 | 45.5 | 52.6 | 40.0 | 44.4 | 50.0 | 60.0 |
| DEX0477_020.nt.2 | 41937.1 | 45.5 | 55.6 | 40.0 | 50.0 | 50.0 | 60.0 |
| DEX0477_020.nt.2 | 41937.2 | 45.5 | 55.6 | 40.0 | 50.0 | 50.0 | 60.0 |
| DEX0477_020.nt.2 | 41938.0 | 45.5 | 47.6 | 40.0 | 44.4 | 50.0 | 50.0 |
| DEX0477_020.nt.2 | 41938.1 | 45.5 | 45.5 | 40.0 | 40.0 | 50.0 | 50.0 |
| DEX0477_020.nt.2 | 41938.2 | 50.0 | 57.9 | 50.0 | 62.5 | 50.0 | 54.5 |
| DEX0477_020.nt.2 | 41939.0 | 45.5 | 45.5 | 40.0 | 40.0 | 50.0 | 50.0 |
| DEX0477_020.nt.2 | 41939.1 | 45.5 | 45.5 | 40.0 | 40.0 | 50.0 | 50.0 |
| DEX0477_020.nt.2 | 41939.2 | 45.5 | 47.6 | 40.0 | 40.0 | 50.0 | 54.5 |
| DEX0477_020.nt.2 | 41940.0 | 45.5 | 45.5 | 40.0 | 40.0 | 50.0 | 50.0 |
| DEX0477_020.nt.2 | 41940.1 | 45.5 | 45.5 | 40.0 | 40.0 | 50.0 | 50.0 |
| DEX0477_020.nt.2 | 41940.2 | 45.5 | 45.5 | 40.0 | 40.0 | 50.0 | 50.0 |
| DEX0477_020.nt.2 | 78627.0 | 45.5 | 62.5 | 40.0 | 50.0 | 50.0 | 75.0 |
| DEX0477_020.nt.2 | 78627.1 | 45.5 | 66.7 | 40.0 | 57.1 | 50.0 | 75.0 |
| DEX0477_020.nt.2 | 78628.0 | 40.9 | 69.2 | 30.0 | 60.0 | 50.0 | 75.0 |
| DEX0477_020.nt.2 | 78628.1 | 45.5 | 71.4 | 40.0 | 66.7 | 50.0 | 75.0 |
| DEX0477_020.nt.2 | 94128.0 | 50.0 | 50.0 | 50.0 | 50.0 | 50.0 | 50.0 |
| DEX0477_020.nt.2 | 94128.1 | 50.0 | 57.9 | 50.0 | 50.0 | 50.0 | 66.7 |
| DEX0477_020.nt.2 | 102786.0 | 50.0 | 50.0 | 50.0 | 50.0 | 50.0 | 50.0 |
| DEX0477_020.nt.2 | 102786.1 | 50.0 | 52.4 | 50.0 | 50.0 | 50.0 | 54.5 |
| DEX0477_020.nt.2 | 102787.0 | 50.0 | 50.0 | 50.0 | 50.0 | 50.0 | 50.0 |
| DEX0477_020.nt.2 | 102787.1 | 50.0 | 50.0 | 50.0 | 50.0 | 50.0 | 50.0 |
| DEX0477_020.nt.2 | 102789.0 | 45.5 | 50.0 | 40.0 | 50.0 | 50.0 | 50.0 |
| DEX0477_020.nt.2 | 102789.1 | 45.5 | 47.6 | 40.0 | 44.4 | 50.0 | 50.0 |
| DEX0477_021.nt.1 | 26770.0 | 22.7 | 22.7 | 10.0 | 10.0 | 33.3 | 33.3 |
| DEX0477_021.nt.1 | 26770.1 | 22.7 | 22.7 | 10.0 | 10.0 | 33.3 | 33.3 |
| DEX0477_021.nt.1 | 26771.0 | 22.7 | 22.7 | 10.0 | 10.0 | 33.3 | 33.3 |
| DEX0477_021.nt.1 | 26771.1 | 22.7 | 22.7 | 10.0 | 10.0 | 33.3 | 33.3 |
| DEX0477_021.nt.1 | 33088.0 | 31.8 | 31.8 | 20.0 | 20.0 | 41.7 | 41.7 |
| DEX0477_021.nt.1 | 33088.1 | 31.8 | 31.8 | 20.0 | 20.0 | 41.7 | 41.7 |
| DEX0477_022.nt.1 | 33088.2 | 31.8 | 31.8 | 20.0 | 20.0 | 41.7 | 41.7 |
| DEX0477_021.nt.1 | 33088.3 | 27.3 | 27.3 | 10.0 | 10.0 | 41.7 | 41.7 |
| DEX0477_021.nt.1 | 33089.0 | 31.8 | 31.8 | 20.0 | 20.0 | 41.7 | 41.7 |
| DEX0477_021.nt.1 | 33089.1 | 27.3 | 27.3 | 10.0 | 10.0 | 41.7 | 41.7 |
| DEX0477_021.nt.1 | 33089.2 | 22.7 | 22.7 | 10.0 | 10.0 | 33.3 | 33.3 |
| DEX0477_021.nt.1 | 33089.3 | 27.3 | 27.3 | 10.0 | 10.0 | 41.7 | 41.7 |
| DEX0477_021.nt.1 | 41945.0 | 22.7 | 22.7 | 10.0 | 10.0 | 33.3 | 33.3 |
| DEX0477_021.nt.1 | 41945.1 | 31.8 | 31.8 | 20.0 | 20.0 | 41.7 | 41.7 |
| DEX0477_021.nt.1 | 41945.2 | 22.7 | 23.8 | 10.0 | 11.1 | 33.3 | 33.3 |
| DEX0477_021.nt.1 | 41945.3 | 27.3 | 27.3 | 10.0 | 10.0 | 41.7 | 41.7 |
| DEX0477_021.nt.1 | 41945.4 | 22.7 | 22.7 | 10.0 | 10.0 | 33.3 | 33.3 |
| DEX0477_021.nt.1 | 41946.0 | 22.7 | 22.7 | 10.0 | 10.0 | 33.3 | 33.3 |
| DEX0477_021.nt.1 | 41946.1 | 22.7 | 22.7 | 10.0 | 10.0 | 33.3 | 33.3 |
| DEX0477_021.nt.1 | 41946.2 | 27.3 | 27.3 | 10.0 | 10.0 | 41.7 | 41.7 |
| DEX0477_021.nt.1 | 41946.3 | 22.7 | 22.7 | 10.0 | 10.0 | 33.3 | 33.3 |
| DEX0477_021.nt.1 | 41946.4 | 27.3 | 27.3 | 10.0 | 10.0 | 41.7 | 41.7 |
| DEX0477_021.nt.2 | 26770.0 | 22.7 | 22.7 | 10.0 | 10.0 | 33.3 | 33.3 |
| DEX0477_021.nt.2 | 26770.1 | 22.7 | 22.7 | 10.0 | 10.0 | 33.3 | 33.3 |
| DEX0477_021.nt.2 | 26771.0 | 22.7 | 22.7 | 10.0 | 10.0 | 33.3 | 33.3 |
| DEX0477_021.nt.2 | 26771.1 | 22.7 | 22.7 | 10.0 | 10.0 | 33.3 | 33.3 |
| DEX0477_021.nt.2 | 33088.0 | 31.8 | 31.8 | 20.0 | 20.0 | 41.7 | 41.7 |
| DEX0477_021.nt.2 | 33088.1 | 31.8 | 31.8 | 20.0 | 20.0 | 41.7 | 41.7 |
| DEX0477_021.nt.2 | 33088.2 | 31.8 | 31.8 | 20.0 | 20.0 | 41.7 | 41.7 |
| DEX0477_021.nt.2 | 33088.3 | 27.3 | 27.3 | 10.0 | 10.0 | 41.7 | 41.7 |
| DEX0477_021.nt.2 | 33089.0 | 31.8 | 31.8 | 20.0 | 20.0 | 41.7 | 41.7 |
| DEX0477_021.nt.2 | 33089.1 | 27.3 | 27.3 | 10.0 | 10.0 | 41.7 | 41.7 |
| DEX0477_021.nt.2 | 33089.2 | 22.7 | 22.7 | 10.0 | 10.0 | 33.3 | 33.3 |
| DEX0477_021.nt.2 | 33089.3 | 27.3 | 27.3 | 10.0 | 10.0 | 41.7 | 41.7 |
| DEX0477_021.nt.2 | 41945.0 | 22.7 | 22.7 | 10.0 | 10.0 | 33.3 | 33.3 |
| DEX0477_021.nt.2 | 41945.1 | 31.8 | 31.8 | 20.0 | 20.0 | 41.7 | 41.7 |
| DEX0477_021.nt.2 | 41945.2 | 22.7 | 23.8 | 10.0 | 11.1 | 33.3 | 33.3 |
| DEX0477_021.nt.2 | 41945.3 | 27.3 | 27.3 | 10.0 | 10.0 | 41.7 | 41.7 |
| DEX0477_021.nt.2 | 41945.4 | 22.7 | 22.7 | 10.0 | 10.0 | 33.3 | 33.3 |
| DEX0477_021.nt.2 | 41946.0 | 22.7 | 22.7 | 10.0 | 10.0 | 33.3 | 33.3 |
| DEX0477_021.nt.2 | 41946.1 | 22.7 | 22.7 | 10.0 | 10.0 | 33.3 | 33.3 |
| DEX0477_021.nt.2 | 41946.2 | 27.3 | 27.3 | 10.0 | 10.0 | 41.7 | 41.7 |
| DEX0477_021.nt.2 | 41946.3 | 22.7 | 22.7 | 10.0 | 10.0 | 33.3 | 33.3 |
| DEX0477_021.nt.2 | 41946.4 | 27.3 | 27.3 | 10.0 | 10.0 | 41.7 | 41.7 |
| DEX0477_022.nt.1 | 41937.0 | 45.5 | 52.6 | 40.0 | 44.4 | 50.0 | 60.0 |
| DEX0477_022.nt.1 | 41937.1 | 45.5 | 55.6 | 40.0 | 50.0 | 50.0 | 60.0 |
| DEX0477_022.nt.1 | 41937.2 | 45.5 | 55.6 | 40.0 | 50.0 | 50.0 | 60.0 |
| DEX0477_022.nt.1 | 41939.0 | 45.5 | 45.5 | 40.0 | 40.0 | 50.0 | 50.0 |
| DEX0477_022.nt.1 | 41939.1 | 45.5 | 45.5 | 40.0 | 40.0 | 50.0 | 50.0 |
| DEX0477_022.nt.1 | 41939.2 | 45.5 | 47.6 | 40.0 | 40.0 | 50.0 | 54.5 |
| DEX0477_022.nt.1 | 41940.0 | 45.5 | 45.5 | 40.0 | 40.0 | 50.0 | 50.0 |
| DEX0477_022.nt.1 | 41940.1 | 45.5 | 45.5 | 40.0 | 40.0 | 50.0 | 50.0 |
| DEX0477_022.nt.1 | 41940.2 | 45.5 | 45.5 | 40.0 | 40.0 | 50.0 | 50.0 |
| DEX0477_022.nt.1 | 78627.0 | 45.5 | 62.5 | 40.0 | 50.0 | 50.0 | 75.0 |
| DEX0477_022.nt.1 | 78627.1 | 45.5 | 66.7 | 40.0 | 57.1 | 50.0 | 75.0 |
| DEX0477_022.nt.1 | 78628.0 | 40.9 | 69.2 | 30.0 | 60.0 | 50.0 | 75.0 |
| DEX0477_022.nt.1 | 78628.1 | 45.5 | 71.4 | 40.0 | 66.7 | 50.0 | 75.0 |
| DEX0477_023.nt.1 | 33088.0 | 31.8 | 31.8 | 20.0 | 20.0 | 41.7 | 41.7 |
| DEX0477_023.nt.1 | 33088.1 | 31.8 | 31.8 | 20.0 | 20.0 | 41.7 | 41.7 |
| DEX0477_023.nt.1 | 33088.2 | 31.8 | 31.8 | 20.0 | 20.0 | 41.7 | 41.7 |
| DEX0477_023.nt.1 | 33088.3 | 27.3 | 27.3 | 10.0 | 10.0 | 41.7 | 41.7 |
| DEX0477_024.nt.1 | 26770.0 | 22.7 | 22.7 | 10.0 | 10.0 | 33.3 | 33.3 |
| DEX0477_024.nt.1 | 26770.1 | 22.7 | 22.7 | 10.0 | 10.0 | 33.3 | 33.3 |
| DEX0477_024.nt.1 | 26771.0 | 22.7 | 22.7 | 10.0 | 10.0 | 33.3 | 33.3 |
| DEX0477_024.nt.1 | 26771.1 | 22.7 | 22.7 | 10.0 | 10.0 | 33.3 | 33.3 |
| DEX0477_024.nt.1 | 41945.0 | 22.7 | 22.7 | 10.0 | 10.0 | 33.3 | 33.3 |
| DEX0477_024.nt.1 | 41945.1 | 31.8 | 31.8 | 20.0 | 20.0 | 41.7 | 41.7 |
| DEX0477_024.nt.1 | 41945.2 | 22.7 | 23.8 | 10.0 | 11.1 | 33.3 | 33.3 |
| DEX0477_024.nt.1 | 41945.3 | 27.3 | 27.3 | 10.0 | 10.0 | 41.7 | 41.7 |
| DEX0477_024.nt.1 | 41945.4 | 22.7 | 22.7 | 10.0 | 10.0 | 33.3 | 33.3 |
| DEX0477_024.nt.1 | 41946.0 | 22.7 | 22.7 | 10.0 | 10.0 | 33.3 | 33.3 |
| DEX0477_024.nt.1 | 41946.1 | 22.7 | 22.7 | 10.0 | 10.0 | 33.3 | 33.3 |
| DEX0477_024.nt.1 | 41946.2 | 27.3 | 27.3 | 10.0 | 10.0 | 41.7 | 41.7 |
| DEX0477_024.nt.1 | 41946.3 | 22.7 | 22.7 | 10.0 | 10.0 | 33.3 | 33.3 |
| DEX0477_024.nt.1 | 41946.4 | 27.3 | 27.3 | 10.0 | 10.0 | 41.7 | 41.7 |
| DEX0477_024.nt.2 | 26770.0 | 22.7 | 22.7 | 10.0 | 10.0 | 33.3 | 33.3 |
| DEX0477_024.nt.2 | 26770.1 | 22.7 | 22.7 | 10.0 | 10.0 | 33.3 | 33.3 |
| DEX0477_024.nt.2 | 26771.0 | 22.7 | 22.7 | 10.0 | 10.0 | 33.3 | 33.3 |
| DEX0477_024.nt.2 | 26771.1 | 22.7 | 22.7 | 10.0 | 10.0 | 33.3 | 33.3 |
| DEX0477_024.nt.2 | 41945.0 | 22.7 | 22.7 | 10.0 | 10.0 | 33.3 | 33.3 |
| DEX0477_024.nt.2 | 41945.1 | 31.8 | 31.8 | 20.0 | 20.0 | 41.7 | 41.7 |
| DEX0477_024.nt.2 | 41945.2 | 22.7 | 23.8 | 10.0 | 11.1 | 33.3 | 33.3 |
| DEX0477_024.nt.2 | 41945.3 | 27.3 | 27.3 | 10.0 | 10.0 | 41.7 | 41.7 |
| DEX0477_024.nt.2 | 41945.4 | 22.7 | 22.7 | 10.0 | 10.0 | 33.3 | 33.3 |
| DEX0477_024.nt.2 | 41946.0 | 22.7 | 22.7 | 10.0 | 10.0 | 33.3 | 33.3 |
| DEX0477_024.nt.2 | 41946.1 | 22.7 | 22.7 | 10.0 | 10.0 | 33.3 | 33.3 |
| DEX0477_024.nt.2 | 41946.2 | 27.3 | 27.3 | 10.0 | 10.0 | 41.7 | 41.7 |
| DEX0477_024.nt.2 | 41946.3 | 22.7 | 22.7 | 10.0 | 10.0 | 33.3 | 33.3 |
| DEX0477_024.nt.2 | 41946.4 | 27.3 | 27.3 | 10.0 | 10.0 | 41.7 | 41.7 |
| DEX0477_024.nt.3 | 26770.0 | 22.7 | 22.7 | 10.0 | 10.0 | 33.3 | 33.3 |
| DEX0477_024.nt.3 | 26770.1 | 22.7 | 22.7 | 10.0 | 10.0 | 33.3 | 33.3 |
| DEX0477_024.nt.3 | 26771.0 | 22.7 | 22.7 | 10.0 | 10.0 | 33.3 | 33.3 |
| DEX0477_024.nt.3 | 26771.1 | 22.7 | 22.7 | 10.0 | 10.0 | 33.3 | 33.3 |
| DEX0477_024.nt.3 | 41945.0 | 22.7 | 22.7 | 10.0 | 10.0 | 33.3 | 33.3 |
| DEX0477_024.nt.3 | 41945.1 | 31.8 | 31.8 | 20.0 | 20.0 | 41.7 | 41.7 |
| DEX0477_024.nt.3 | 41945.2 | 22.7 | 23.8 | 10.0 | 11.1 | 33.3 | 33.3 |
| DEX0477_024.nt.3 | 41945.3 | 27.3 | 27.3 | 10.0 | 10.0 | 41.7 | 41.7 |
| DEX0477_024.nt.3 | 41945.4 | 22.7 | 22.7 | 10.0 | 10.0 | 33.3 | 33.3 |
| DEX0477_024.nt.3 | 41946.0 | 22.7 | 22.7 | 10.0 | 10.0 | 33.3 | 33.3 |
| DEX0477_024.nt.3 | 41946.1 | 22.7 | 22.7 | 10.0 | 10.0 | 33.3 | 33.3 |
| DEX0477_024.nt.3 | 41946.2 | 27.3 | 27.3 | 10.0 | 10.0 | 41.7 | 41.7 |
| DEX0477_024.nt.3 | 41946.3 | 22.7 | 22.7 | 10.0 | 10.0 | 33.3 | 33.3 |
| DEX0477_024.nt.3 | 41946.4 | 27.3 | 27.3 | 10.0 | 10.0 | 41.7 | 41.7 |
| DEX0477_024.nt.4 | 26770.0 | 22.7 | 22.7 | 10.0 | 10.0 | 33.3 | 33.3 |
| DEX0477_024.nt.4 | 26770.1 | 22.7 | 22.7 | 10.0 | 10.0 | 33.3 | 33.3 |
| DEX0477_024.nt.4 | 41945.0 | 22.7 | 22.7 | 10.0 | 10.0 | 33.3 | 33.3 |
| DEX0477_024.nt.4 | 41945.1 | 31.8 | 31.8 | 20.0 | 20.0 | 41.7 | 41.7 |
| DEX0477_024.nt.4 | 41945.2 | 22.7 | 23.8 | 10.0 | 11.1 | 33.3 | 33.3 |
| DEX0477_024.nt.4 | 41945.3 | 27.3 | 27.3 | 10.0 | 10.0 | 41.7 | 41.7 |
| DEX0477_024.nt.4 | 41945.4 | 22.7 | 22.7 | 10.0 | 10.0 | 33.3 | 33.3 |
| DEX0477_024.nt.4 | 41946.0 | 22.7 | 22.7 | 10.0 | 10.0 | 33.3 | 33.3 |
| DEX0477_024.nt.4 | 41946.1 | 22.7 | 22.7 | 10.0 | 10.0 | 33.3 | 33.3 |
| DEX0477_024.nt.4 | 41946.2 | 27.3 | 27.3 | 10.0 | 10.0 | 41.7 | 41.7 |
| DEX0477_024.nt.4 | 41946.3 | 22.7 | 22.7 | 10.0 | 10.0 | 33.3 | 33.3 |
| DEX0477_024.nt.4 | 41946.4 | 27.3 | 27.3 | 10.0 | 10.0 | 41.7 | 41.7 |
| DEX0477_033.nt.1 | 19534.0 | 31.8 | 36.8 | 40.0 | 50.0 | 25.0 | 27.3 |
| DEX0477_033.nt.1 | 19534.1 | 31.8 | 36.8 | 40.0 | 50.0 | 25.0 | 27.3 |
| DEX0477_033.nt.1 | 19535.0 | 31.8 | 35.0 | 40.0 | 50.0 | 25.0 | 25.0 |
| DEX0477_033.nt.1 | 19535.1 | 31.8 | 38.9 | 40.0 | 50.0 | 25.0 | 30.0 |
| DEX0477_033.nt.1 | 41957.0 | 27.3 | 28.6 | 30.0 | 33.3 | 25.0 | 25.0 |
| DEX0477_033.nt.1 | 41957.1 | 27.3 | 28.6 | 30.0 | 33.3 | 25.0 | 25.0 |
| DEX0477_033.nt.1 | 41957.2 | 27.3 | 31.6 | 30.0 | 37.5 | 25.0 | 27.3 |
| DEX0477_033.nt.1 | 41958.0 | 31.8 | 31.8 | 40.0 | 40.0 | 25.0 | 25.0 |
| DEX0477_033.nt.1 | 41958.1 | 31.8 | 31.8 | 40.0 | 40.0 | 25.0 | 25.0 |
| DEX0477_033.nt.1 | 41958.2 | 31.8 | 31.8 | 40.0 | 40.0 | 25.0 | 25.0 |
| DEX0477_033.nt.2 | 19534.0 | 31.8 | 36.8 | 40.0 | 50.0 | 25.0 | 27.3 |
| DEX0477_033.nt.2 | 19534.1 | 31.8 | 36.8 | 40.0 | 50.0 | 25.0 | 27.3 |
| DEX0477_033.nt.2 | 19535.0 | 31.8 | 35.0 | 40.0 | 50.0 | 25.0 | 25.0 |
| DEX0477_033.nt.2 | 19535.1 | 31.8 | 38.9 | 40.0 | 50.0 | 25.0 | 30.0 |
| DEX0477_033.nt.2 | 41957.0 | 27.3 | 28.6 | 30.0 | 33.3 | 25.0 | 25.0 |
| DEX0477_033.nt.2 | 41957.1 | 27.3 | 28.6 | 30.0 | 33.3 | 25.0 | 25.0 |
| DEX0477_033.nt.2 | 41957.2 | 27.3 | 31.6 | 30.0 | 37.5 | 25.0 | 27.3 |
| DEX0477_033.nt.2 | 41958.0 | 31.8 | 31.8 | 40.0 | 40.0 | 25.0 | 25.0 |
| DEX0477_033.nt.2 | 41958.1 | 31.8 | 31.8 | 40.0 | 40.0 | 25.0 | 25.0 |
| DEX0477_033.nt.2 | 41958.2 | 31.8 | 31.8 | 40.0 | 40.0 | 25.0 | 25.0 |
| DEX0477_033.nt.3 | 19534.0 | 31.8 | 36.8 | 40.0 | 50.0 | 25.0 | 27.3 |
| DEX0477_033.nt.3 | 19534.1 | 31.8 | 36.8 | 40.0 | 50.0 | 25.0 | 27.3 |
| DEX0477_033.nt.3 | 19535.0 | 31.8 | 35.0 | 40.0 | 50.0 | 25.0 | 25.0 |
| DEX0477_033.nt.3 | 19535.1 | 31.8 | 38.9 | 40.0 | 50.0 | 25.0 | 30.0 |
| DEX0477_033.nt.3 | 41957.0 | 27.3 | 28.6 | 30.0 | 33.3 | 25.0 | 25.0 |
| DEX0477_033.nt.3 | 41957.1 | 27.3 | 28.6 | 30.0 | 33.3 | 25.0 | 25.0 |
| DEX0477_033.nt.3 | 41957.2 | 27.3 | 31.6 | 30.0 | 37.5 | 25.0 | 27.3 |
| DEX0477_033.nt.3 | 41958.0 | 31.8 | 31.8 | 40.0 | 40.0 | 25.0 | 25.0 |
| DEX0477_033.nt.3 | 41958.1 | 31.8 | 31.8 | 40.0 | 40.0 | 25.0 | 25.0 |
| DEX0477_033.nt.3 | 41958.2 | 31.8 | 31.8 | 40.0 | 40.0 | 25.0 | 25.0 |
| DEX0477_036.nt.1 | 2371.0 | 72.7 | 72.7 | 90.0 | 90.0 | 58.3 | 58.3 |
| DEX0477_036.nt.1 | 2406.0 | 72.7 | 72.7 | 90.0 | 90.0 | 58.3 | 58.3 |
| DEX0477_036.nt.1 | 2442.0 | 72.7 | 72.7 | 90.0 | 90.0 | 58.3 | 58.3 |
| DEX0477_036.nt.1 | 3111.0 | 63.6 | 73.7 | 80.0 | 88.9 | 50.0 | 60.0 |
| DEX0477_042.nt.1 | 3383.0 | 22.7 | 22.7 | 0.0 | 0.0 | 41.7 | 41.7 |
| DEX0477_046.nt.1 | 1551.0 | 36.4 | 36.4 | 30.0 | 30.0 | 41.7 | 41.7 |
| DEX0477_047.nt.1 | 452.0 | 45.5 | 47.6 | 60.0 | 60.0 | 33.3 | 36.4 |
| DEX0477_048.nt.1 | 33514.0 | 18.2 | 22.2 | 10.0 | 16.7 | 25.0 | 25.0 |
| DEX0477_048.nt.1 | 33514.1 | 18.2 | 25.0 | 10.0 | 16.7 | 25.0 | 30.0 |
| DEX0477_048.nt.3 | 33514.1 | 18.2 | 25.0 | 10.0 | 16.7 | 25.0 | 30.0 |
| DEX0477_048.nt.4 | 33514.1 | 18.2 | 25.0 | 10.0 | 16.7 | 25.0 | 30.0 |
| DEX0477_051.nt.1 | 3081.0 | 45.5 | 45.5 | 60.0 | 60.0 | 33.3 | 33.3 |
| DEX0477_052.nt.1 | 10766.0 | 59.1 | 68.4 | 70.0 | 87.5 | 50.0 | 54.5 |
| DEX0477_052.nt.1 | 10766.1 | 63.6 | 70.0 | 70.0 | 77.8 | 58.3 | 63.6 |
| DEX0477_052.nt.1 | 10767.0 | 63.6 | 66.7 | 70.0 | 77.8 | 58.3 | 58.3 |
| DEX0477_052.nt.1 | 10767.1 | 59.1 | 61.9 | 70.0 | 77.8 | 50.0 | 50.0 |
| DEX0477_054.nt.1 | 9340.0 | 9.1 | 100.0 | 10.0 | 100.0 | 8.3 | 100.0 |
| DEX0477_054.nt.1 | 9340.1 | 4.5 | 50.0 | 0.0 | 0.0 | 8.3 | 100.0 |
| DEX0477_054.nt.2 | 9341.0 | 54.5 | 54.5 | 70.0 | 70.0 | 41.7 | 41.7 |
| DEX0477_054.nt.2 | 9341.1 | 50.0 | 50.0 | 60.0 | 60.0 | 41.7 | 41.7 |
| DEX0477_057.nt.1 | 28972.0 | 36.4 | 36.4 | 50.0 | 50.0 | 25.0 | 25.0 |
| DEX0477_057.nt.1 | 28972.1 | 31.8 | 31.8 | 40.0 | 40.0 | 25.0 | 25.0 |
| DEX0477_070.nt.1 | 3745.02 | 22.7 | 22.7 | 40.0 | 40.0 | 8.3 | 8.3 |
| DEX0477_076.nt.1 | 1383.0 | 18.2 | 18.2 | 40.0 | 40.0 | 0.0 | 0.0 |

[0592] TABLE 17

| | | Lng | | | | | |
|---|---|---|---|---|---|---|---|
| | | Multi- | Lng | | Lng | | Lng |
| | | Can | Multi- | Lng | Multi- | Lng | Multi- |
| | | 550 | Can 550 | Multi- | Can 550 | Multi- | Can 550 |
| | | ALL | ALL % | Can 550 | SQ | Can 550 | AD |
| | Oligo | % up | valid | SQ % up | % valid | AD % up | % valid |
| DEX ID | Name | n = 22 | up n = 22 | n = 10 | up n = 10 | n = 12 | up n = 12 |
| DEX0477_004.nt.1 | 1200.0 | 63.6 | 63.6 | 80.0 | 80.0 | 50.0 | 50.0 |
| DEX0477_004.nt.1 | 1201.0 | 68.2 | 68.2 | 90.0 | 90.0 | 50.0 | 50.0 |
| DEX0477_006.nt.1 | 9744.0 | 13.6 | 13.6 | 20.0 | 20.0 | 8.3 | 8.3 |
| DEX0477_008.nt.1 | 4733.0 | 95.5 | 95.5 | 100.0 | 100.0 | 91.7 | 91.7 |
| DEX0477_008.nt.1 | 4733.1 | 95.5 | 95.5 | 100.0 | 100.0 | 91.7 | 91.7 |
| DEX0477_008.nt.1 | 4734.0 | 50.0 | 91.7 | 40.0 | 100.0 | 58.3 | 87.5 |
| DEX0477_008.nt.1 | 4734.1 | 95.5 | 95.5 | 100.0 | 100.0 | 91.7 | 91.7 |
| DEX0477_009.nt.1 | 990.0 | 45.5 | 45.5 | 30.0 | 30.0 | 58.3 | 58.3 |
| DEX0477_016.nt.1 | 33428.0 | 22.7 | 22.7 | 10.0 | 10.0 | 33.3 | 33.3 |
| DEX0477_016.nt.1 | 33428.1 | 27.3 | 28.6 | 10.0 | 10.0 | 41.7 | 45.5 |
| DEX0477_016.nt.1 | 33429.0 | 13.6 | 20.0 | 0.0 | 0.0 | 25.0 | 30.0 |
| DEX0477_016.nt.1 | 33429.1 | 22.7 | 22.7 | 10.0 | 10.0 | 33.3 | 33.3 |
| DEX0477_016.nt.1 | 37143.0 | 22.7 | 22.7 | 10.0 | 10.0 | 33.3 | 33.3 |
| DEX0477_016.nt.1 | 37143.1 | 22.7 | 22.7 | 10.0 | 10.0 | 33.3 | 33.3 |
| DEX0477_016.nt.1 | 37143.2 | 27.3 | 28.6 | 10.0 | 11.1 | 41.7 | 41.7 |
| DEX0477_016.nt.1 | 37143.3 | 27.3 | 27.3 | 10.0 | 10.0 | 41.7 | 41.7 |
| DEX0477_016.nt.1 | 37143.4 | 22.7 | 22.7 | 10.0 | 10.0 | 33.3 | 33.3 |
| DEX0477_016.nt.1 | 39533.0 | 27.3 | 27.3 | 10.0 | 10.0 | 41.7 | 41.7 |
| DEX0477_016.nt.1 | 39533.1 | 27.3 | 27.3 | 10.0 | 10.0 | 41.7 | 41.7 |
| DEX0477_016.nt.1 | 39534.0 | 22.7 | 22.7 | 10.0 | 10.0 | 33.3 | 33.3 |
| DEX0477_016.nt.1 | 39534.1 | 27.3 | 27.3 | 10.0 | 10.0 | 41.7 | 41.7 |
| DEX0477_016.nt.2 | 33428.0 | 22.7 | 22.7 | 10.0 | 10.0 | 33.3 | 33.3 |
| DEX0477_016.nt.2 | 33428.1 | 27.3 | 28.6 | 10.0 | 10.0 | 41.7 | 45.5 |
| DEX0477_016.nt.2 | 33429.0 | 13.6 | 20.0 | 0.0 | 0.0 | 25.0 | 30.0 |
| DEX0477_016.nt.2 | 33429.1 | 22.7 | 22.7 | 10.0 | 10.0 | 33.3 | 33.3 |
| DEX0477_016.nt.2 | 37143.0 | 22.7 | 22.7 | 10.0 | 10.0 | 33.3 | 33.3 |
| DEX0477_016.nt.2 | 37143.1 | 22.7 | 22.7 | 10.0 | 10.0 | 33.3 | 33.3 |
| DEX0477_016.nt.2 | 37143.2 | 27.3 | 28.6 | 10.0 | 11.1 | 41.7 | 41.7 |
| DEX0477_016.nt.2 | 37143.3 | 27.3 | 27.3 | 10.0 | 10.0 | 41.7 | 41.7 |
| DEX0477_016.nt.2 | 37143.4 | 22.7 | 22.7 | 10.0 | 10.0 | 33.3 | 33.3 |
| DEX0477_016.nt.2 | 39533.0 | 27.3 | 27.3 | 10.0 | 10.0 | 41.7 | 41.7 |
| DEX0477_016.nt.2 | 39533.1 | 27.3 | 27.3 | 10.0 | 10.0 | 41.7 | 41.7 |
| DEX0477_016.nt.2 | 39534.0 | 22.7 | 22.7 | 10.0 | 10.0 | 33.3 | 33.3 |
| DEX0477_016.nt.2 | 39534.1 | 27.3 | 27.3 | 10.0 | 10.0 | 41.7 | 41.7 |
| DEX0477_016.nt.4 | 33428.0 | 22.7 | 22.7 | 10.0 | 10.0 | 33.3 | 33.3 |
| DEX0477_016.nt.4 | 33428.1 | 27.3 | 28.6 | 10.0 | 10.0 | 41.7 | 45.5 |
| DEX0477_016.nt.4 | 33429.0 | 13.6 | 20.0 | 0.0 | 0.0 | 25.0 | 30.0 |
| DEX0477_016.nt.4 | 33429.1 | 22.7 | 22.7 | 10.0 | 10.0 | 33.3 | 33.3 |
| DEX0477_016.nt.4 | 37143.0 | 22.7 | 22.7 | 10.0 | 10.0 | 33.3 | 33.3 |
| DEX0477_016.nt.4 | 37143.1 | 22.7 | 22.7 | 10.0 | 10.0 | 33.3 | 33.3 |
| DEX0477_016.nt.4 | 37143.2 | 27.3 | 28.6 | 10.0 | 11.1 | 41.7 | 41.7 |
| DEX0477_016.nt.4 | 37143.3 | 27.3 | 27.3 | 10.0 | 10.0 | 41.7 | 41.7 |
| DEX0477_016.nt.4 | 37143.4 | 22.7 | 22.7 | 10.0 | 10.0 | 33.3 | 33.3 |
| DEX0477_016.nt.4 | 39533.0 | 27.3 | 27.3 | 10.0 | 10.0 | 41.7 | 41.7 |
| DEX0477_016.nt.4 | 39533.1 | 27.3 | 27.3 | 10.0 | 10.0 | 41.7 | 41.7 |
| DEX0477_016.nt.4 | 39534.0 | 22.7 | 22.7 | 10.0 | 10.0 | 33.3 | 33.3 |
| DEX0477_016.nt.4 | 39534.1 | 27.3 | 27.3 | 10.0 | 10.0 | 41.7 | 41.7 |
| DEX0477_016.nt.5 | 33428.0 | 22.7 | 22.7 | 10.0 | 10.0 | 33.3 | 33.3 |
| DEX0477_016.nt.5 | 33428.1 | 27.3 | 28.6 | 10.0 | 10.0 | 41.7 | 45.5 |
| DEX0477_016.nt.5 | 33429.0 | 13.6 | 20.0 | 0.0 | 0.0 | 25.0 | 30.0 |
| DEX0477_016.nt.5 | 33429.1 | 22.7 | 22.7 | 10.0 | 10.0 | 33.3 | 33.3 |
| DEX0477_016.nt.5 | 37143.0 | 22.7 | 22.7 | 10.0 | 10.0 | 33.3 | 33.3 |
| DEX0477_016.nt.5 | 37143.1 | 22.7 | 22.7 | 10.0 | 10.0 | 33.3 | 33.3 |
| DEX0477_016.nt.5 | 37143.2 | 27.3 | 28.6 | 10.0 | 11.1 | 41.7 | 41.7 |
| DEX0477_016.nt.5 | 37143.3 | 27.3 | 27.3 | 10.0 | 10.0 | 41.7 | 41.7 |
| DEX0477_016.nt.5 | 37143.4 | 22.7 | 22.7 | 10.0 | 10.0 | 33.3 | 33.3 |
| DEX0477_016.nt.5 | 39533.0 | 27.3 | 27.3 | 10.0 | 10.0 | 41.7 | 41.7 |
| DEX0477_016.nt.5 | 39533.1 | 27.3 | 27.3 | 10.0 | 10.0 | 41.7 | 41.7 |
| DEX0477_016.nt.5 | 39534.0 | 22.7 | 22.7 | 10.0 | 10.0 | 33.3 | 33.3 |
| DEX0477_016.nt.5 | 39534.1 | 27.3 | 27.3 | 10.0 | 10.0 | 41.7 | 41.7 |
| DEX0477_019.nt.1 | 41937.0 | 45.5 | 76.9 | 40.0 | 66.7 | 50.0 | 85.7 |
| DEX0477_019.nt.1 | 41937.1 | 45.5 | 76.9 | 40.0 | 66.7 | 50.0 | 85.7 |
| DEX0477_019.nt.1 | 41937.2 | 45.5 | 66.7 | 40.0 | 57.1 | 50.0 | 75.0 |
| DEX0477_019.nt.1 | 41938.0 | 45.5 | 66.7 | 40.0 | 57.1 | 50.0 | 75.0 |
| DEX0477_019.nt.1 | 41938.1 | 45.5 | 58.8 | 40.0 | 57.1 | 50.0 | 60.0 |
| DEX0477_019.nt.1 | 41938.2 | 45.5 | 62.5 | 40.0 | 57.1 | 50.0 | 66.7 |
| DEX0477_019.nt.1 | 41939.0 | 45.5 | 45.5 | 40.0 | 40.0 | 50.0 | 50.0 |
| DEX0477_019.nt.1 | 41939.1 | 45.5 | 47.6 | 40.0 | 44.4 | 50.0 | 50.0 |
| DEX0477_019.nt.1 | 41939.2 | 45.5 | 45.5 | 40.0 | 40.0 | 50.0 | 50.0 |
| DEX0477_019.nt.1 | 41940.0 | 45.5 | 45.5 | 40.0 | 40.0 | 50.0 | 50.0 |
| DEX0477_019.nt.1 | 41940.1 | 45.5 | 45.5 | 40.0 | 40.0 | 50.0 | 50.0 |
| DEX0477_019.nt.1 | 41940.2 | 45.5 | 45.5 | 40.0 | 40.0 | 50.0 | 50.0 |
| DEX0477_019.nt.1 | 78627.0 | 45.5 | 76.9 | 40.0 | 66.7 | 50.0 | 85.7 |
| DEX0477_019.nt.1 | 78627.1 | 40.9 | 69.2 | 30.0 | 50.0 | 50.0 | 85.7 |
| DEX0477_019.nt.1 | 78628.0 | 40.9 | 81.8 | 30.0 | 75.0 | 50.0 | 85.7 |
| DEX0477_019.nt.1 | 78628.1 | 45.5 | 76.9 | 40.0 | 66.7 | 50.0 | 85.7 |
| DEX0477_019.nt.1 | 94127.0 | 36.4 | 61.5 | 30.0 | 50.0 | 41.7 | 71.4 |
| DEX0477_019.nt.1 | 94127.1 | 40.9 | 69.2 | 40.0 | 57.1 | 41.7 | 83.3 |
| DEX0477_019.nt.1 | 94128.0 | 50.0 | 50.0 | 50.0 | 50.0 | 50.0 | 50.0 |
| DEX0477_019.nt.1 | 94128.1 | 50.0 | 61.1 | 50.0 | 55.6 | 50.0 | 66.7 |
| DEX0477_019.nt.1 | 102785.0 | 45.5 | 71.4 | 40.0 | 66.7 | 50.0 | 75.0 |
| DEX0477_019.nt.1 | 102785.1 | 45.5 | 71.4 | 40.0 | 66.7 | 50.0 | 75.0 |
| DEX0477_019.nt.1 | 102786.0 | 50.0 | 57.9 | 50.0 | 55.6 | 50.0 | 60.0 |
| DEX0477_019.nt.1 | 102786.1 | 50.0 | 55.0 | 50.0 | 55.6 | 50.0 | 54.5 |
| DEX0477_019.nt.1 | 102787.0 | 50.0 | 50.0 | 50.0 | 50.0 | 50.0 | 50.0 |
| DEX0477_019.nt.1 | 102787.1 | 50.0 | 50.0 | 50.0 | 50.0 | 50.0 | 50.0 |
| DEX0477_019.nt.1 | 102789.0 | 50.0 | 52.4 | 50.0 | 55.6 | 50.0 | 50.0 |
| DEX0477_019.nt.1 | 102789.1 | 45.5 | 58.8 | 40.0 | 57.1 | 50.0 | 60.0 |
| DEX0477_020.nt.1 | 41937.0 | 45.5 | 76.9 | 40.0 | 66.7 | 50.0 | 85.7 |
| DEX0477_020.nt.1 | 41937.1 | 45.5 | 76.9 | 40.0 | 66.7 | 50.0 | 85.7 |
| DEX0477_020.nt.1 | 41937.2 | 45.5 | 66.7 | 40.0 | 57.1 | 50.0 | 75.0 |
| DEX0477_020.nt.1 | 41938.0 | 45.5 | 66.7 | 40.0 | 57.1 | 50.0 | 75.0 |
| DEX0477_020.nt.1 | 41938.1 | 45.5 | 58.8 | 40.0 | 57.1 | 50.0 | 60.0 |
| DEX0477_020.nt.1 | 41938.2 | 45.5 | 62.5 | 40.0 | 57.1 | 50.0 | 66.7 |
| DEX0477_020.nt.1 | 41939.0 | 45.5 | 45.5 | 40.0 | 40.0 | 50.0 | 50.0 |
| DEX0477_020.nt.1 | 41939.1 | 45.5 | 47.6 | 40.0 | 44.4 | 50.0 | 50.0 |
| DEX0477_020.nt.1 | 41939.2 | 45.5 | 45.5 | 40.0 | 40.0 | 50.0 | 50.0 |
| DEX0477_020.nt.1 | 41940.0 | 45.5 | 45.5 | 40.0 | 40.0 | 50.0 | 50.0 |
| DEX0477_020.nt.1 | 41940.1 | 45.5 | 45.5 | 40.0 | 40.0 | 50.0 | 50.0 |
| DEX0477_020.nt.1 | 41940.2 | 45.5 | 45.5 | 40.0 | 40.0 | 50.0 | 50.0 |
| DEX0477_020.nt.1 | 78627.0 | 45.5 | 76.9 | 40.0 | 66.7 | 50.0 | 85.7 |
| DEX0477_020.nt.1 | 78627.1 | 40.9 | 69.2 | 30.0 | 50.0 | 50.0 | 85.7 |
| DEX0477_020.nt.1 | 78628.0 | 40.9 | 81.8 | 30.0 | 75.0 | 50.0 | 85.7 |
| DEX0477_020.nt.1 | 78628.1 | 45.5 | 76.9 | 40.0 | 66.7 | 50.0 | 85.7 |
| DEX0477_020.nt.1 | 94128.0 | 50.0 | 50.0 | 50.0 | 50.0 | 50.0 | 50.0 |
| DEX0477_020.nt.1 | 94128.1 | 50.0 | 61.1 | 50.0 | 55.6 | 50.0 | 66.7 |
| DEX0477_020.nt.1 | 102786.0 | 50.0 | 57.9 | 50.0 | 55.6 | 50.0 | 60.0 |
| DEX0477_020.nt.1 | 102786.1 | 50.0 | 55.0 | 50.0 | 55.6 | 50.0 | 54.5 |
| DEX0477_020.nt.1 | 102787.0 | 50.0 | 50.0 | 50.0 | 50.0 | 50.0 | 50.0 |
| DEX0477_020.nt.1 | 102787.1 | 50.0 | 50.0 | 50.0 | 50.0 | 50.0 | 50.0 |
| DEX0477_020.nt.1 | 102789.0 | 50.0 | 52.4 | 50.0 | 55.6 | 50.0 | 50.0 |
| DEX0477_020.nt.1 | 102789.1 | 45.5 | 58.8 | 40.0 | 57.1 | 50.0 | 60.0 |
| DEX0477_020.nt.2 | 41937.0 | 45.5 | 76.9 | 40.0 | 66.7 | 50.0 | 85.7 |
| DEX0477_020.nt.2 | 41937.1 | 45.5 | 76.9 | 40.0 | 66.7 | 50.0 | 85.7 |
| DEX0477_020.nt.2 | 41937.2 | 45.5 | 66.7 | 40.0 | 57.1 | 50.0 | 75.0 |
| DEX0477_020.nt.2 | 41938.0 | 45.5 | 66.7 | 40.0 | 57.1 | 50.0 | 75.0 |
| DEX0477_020.nt.2 | 41938.1 | 45.5 | 58.8 | 40.0 | 57.1 | 50.0 | 60.0 |
| DEX0477_020.nt.2 | 41938.2 | 45.5 | 62.5 | 40.0 | 57.1 | 50.0 | 66.7 |
| DEX0477_020.nt.2 | 41939.0 | 45.5 | 45.5 | 40.0 | 40.0 | 50.0 | 50.0 |
| DEX0477_020.nt.2 | 41939.1 | 45.5 | 47.6 | 40.0 | 44.4 | 50.0 | 50.0 |
| DEX0477_020.nt.2 | 41939.2 | 45.5 | 45.5 | 40.0 | 40.0 | 50.0 | 50.0 |
| DEX0477_020.nt.2 | 41940.0 | 45.5 | 45.5 | 40.0 | 40.0 | 50.0 | 50.0 |
| DEX0477_020.nt.2 | 41940.1 | 45.5 | 45.5 | 40.0 | 40.0 | 50.0 | 50.0 |
| DEX0477_020.nt.2 | 41940.2 | 45.5 | 45.5 | 40.0 | 40.0 | 50.0 | 50.0 |
| DEX0477_020.nt.2 | 78627.0 | 45.5 | 76.9 | 40.0 | 66.7 | 50.0 | 85.7 |
| DEX0477_020.nt.2 | 78627.1 | 40.9 | 69.2 | 30.0 | 50.0 | 50.0 | 85.7 |
| DEX0477_020.nt.2 | 78628.0 | 40.9 | 81.8 | 30.0 | 75.0 | 50.0 | 85.7 |
| DEX0477_020.nt.2 | 78628.1 | 45.5 | 76.9 | 40.0 | 66.7 | 50.0 | 85.7 |
| DEX0477_020.nt.2 | 94128.0 | 50.0 | 50.0 | 50.0 | 50.0 | 50.0 | 50.0 |
| DEX0477_020.nt.2 | 94128.1 | 50.0 | 61.1 | 50.0 | 55.6 | 50.0 | 66.7 |
| DEX0477_020.nt.2 | 102786.0 | 50.0 | 57.9 | 50.0 | 55.6 | 50.0 | 60.0 |
| DEX0477_020.nt.2 | 102786.1 | 50.0 | 55.0 | 50.0 | 55.6 | 50.0 | 54.5 |
| DEX0477_020.nt.2 | 102787.0 | 50.0 | 50.0 | 50.0 | 50.0 | 50.0 | 50.0 |
| DEX0477_020.nt.2 | 102787.1 | 50.0 | 50.0 | 50.0 | 50.0 | 50.0 | 50.0 |
| DEX0477_020.nt.2 | 102789.0 | 50.0 | 52.4 | 50.0 | 55.6 | 50.0 | 50.0 |
| DEX0477_020.nt.2 | 102789.1 | 45.5 | 58.8 | 40.0 | 57.1 | 50.0 | 60.0 |
| DEX0477_021.nt.1 | 26770.0 | 22.7 | 22.7 | 10.0 | 10.0 | 33.3 | 33.3 |
| DEX0477_021.nt.1 | 26770.1 | 22.7 | 22.7 | 10.0 | 10.0 | 33.3 | 33.3 |
| DEX0477_021.nt.1 | 26771.0 | 22.7 | 22.7 | 10.0 | 10.0 | 33.3 | 33.3 |
| DEX0477_021.nt.1 | 26771.1 | 22.7 | 22.7 | 10.0 | 10.0 | 33.3 | 33.3 |
| DEX0477_021.nt.1 | 33088.0 | 31.8 | 31.8 | 20.0 | 20.0 | 41.7 | 41.7 |
| DEX0477_021.nt.1 | 33088.1 | 27.3 | 27.3 | 20.0 | 20.0 | 33.3 | 33.3 |
| DEX0477_021.nt.1 | 33088.2 | 31.8 | 31.8 | 20.0 | 20.0 | 41.7 | 41.7 |
| DEX0477_021.nt.1 | 33088.3 | 27.3 | 27.3 | 10.0 | 10.0 | 41.7 | 41.7 |
| DEX0477_021.nt.1 | 33089.0 | 31.8 | 31.8 | 20.0 | 20.0 | 41.7 | 41.7 |
| DEX0477_021.nt.1 | 33089.1 | 22.7 | 22.7 | 10.0 | 10.0 | 33.3 | 33.3 |
| DEX0477_021.nt.1 | 33089.2 | 22.7 | 22.7 | 10.0 | 10.0 | 33.3 | 33.3 |
| DEX0477_021.nt.1 | 33089.3 | 22.7 | 22.7 | 10.0 | 10.0 | 33.3 | 33.3 |
| DEX0477_021.nt.1 | 41945.0 | 22.7 | 23.8 | 10.0 | 11.1 | 33.3 | 33.3 |
| DEX0477_021.nt.1 | 41945.1 | 27.3 | 27.3 | 20.0 | 20.0 | 33.3 | 33.3 |
| DEX0477_021.nt.1 | 41945.2 | 22.7 | 23.8 | 10.0 | 11.1 | 33.3 | 33.3 |
| DEX0477_021.nt.1 | 41945.3 | 22.7 | 22.7 | 10.0 | 10.0 | 33.3 | 33.3 |
| DEX0477_021.nt.1 | 41945.4 | 22.7 | 22.7 | 10.0 | 10.0 | 33.3 | 33.3 |
| DEX0477_021.nt.1 | 41946.0 | 22.7 | 25.0 | 10.0 | 12.5 | 33.3 | 33.3 |
| DEX0477_021.nt.1 | 41946.1 | 22.7 | 22.7 | 10.0 | 10.0 | 33.3 | 33.3 |
| DEX0477_021.nt.1 | 41946.2 | 22.7 | 22.7 | 10.0 | 10.0 | 33.3 | 33.3 |
| DEX0477_021.nt.1 | 41946.3 | 22.7 | 22.7 | 10.0 | 10.0 | 33.3 | 33.3 |
| DEX0477_021.nt.1 | 41946.4 | 22.7 | 22.7 | 10.0 | 10.0 | 33.3 | 33.3 |
| DEX0477_021.nt.2 | 26770.0 | 22.7 | 22.7 | 10.0 | 10.0 | 33.3 | 33.3 |
| DEX0477_021.nt.2 | 26770.1 | 22.7 | 22.7 | 10.0 | 10.0 | 33.3 | 33.3 |
| DEX0477_021.nt.2 | 26771.0 | 22.7 | 22.7 | 10.0 | 10.0 | 33.3 | 33.3 |
| DEX0477_021.nt.2 | 26771.1 | 22.7 | 22.7 | 10.0 | 10.0 | 33.3 | 33.3 |
| DEX0477_021.nt.2 | 33088.0 | 31.8 | 31.8 | 20.0 | 20.0 | 41.7 | 41.7 |
| DEX0477_021.nt.2 | 33088.1 | 27.3 | 27.3 | 20.0 | 20.0 | 33.3 | 33.3 |
| DEX0477_021.nt.2 | 33088.2 | 31.8 | 31.8 | 20.0 | 20.0 | 41.7 | 41.7 |
| DEX0477_021.nt.2 | 33088.3 | 27.3 | 27.3 | 10.0 | 10.0 | 41.7 | 41.7 |
| DEX0477_021.nt.2 | 33089.0 | 31.8 | 31.8 | 20.0 | 20.0 | 41.7 | 41.7 |
| DEX0477_021.nt.2 | 33089.1 | 22.7 | 22.7 | 10.0 | 10.0 | 33.3 | 33.3 |
| DEX0477_021.nt.2 | 33089.2 | 22.7 | 22.7 | 10.0 | 10.0 | 33.3 | 33.3 |
| DEX0477_021.nt.2 | 33089.3 | 22.7 | 22.7 | 10.0 | 10.0 | 33.3 | 33.3 |
| DEX0477_021.nt.2 | 41945.0 | 22.7 | 23.8 | 10.0 | 11.1 | 33.3 | 33.3 |
| DEX0477_021.nt.2 | 41945.1 | 27.3 | 27.3 | 20.0 | 20.0 | 33.3 | 33.3 |
| DEX0477_021.nt.2 | 41945.2 | 22.7 | 23.8 | 10.0 | 11.1 | 33.3 | 33.3 |
| DEX0477_021.nt.2 | 41945.3 | 22.7 | 22.7 | 10.0 | 10.0 | 33.3 | 33.3 |
| DEX0477_021.nt.2 | 41945.4 | 22.7 | 22.7 | 10.0 | 10.0 | 33.3 | 33.3 |
| DEX0477_021.nt.2 | 41946.0 | 22.7 | 25.0 | 10.0 | 12.5 | 33.3 | 33.3 |
| DEX0477_021.nt.2 | 41946.1 | 22.7 | 22.7 | 10.0 | 10.0 | 33.3 | 33.3 |
| DEX0477_021.nt.2 | 41946.2 | 22.7 | 22.7 | 10.0 | 10.0 | 33.3 | 33.3 |
| DEX0477_021.nt.2 | 41946.3 | 22.7 | 22.7 | 10.0 | 10.0 | 33.3 | 33.3 |
| DEX0477_021.nt.2 | 41946.4 | 22.7 | 22.7 | 10.0 | 10.0 | 33.3 | 33.3 |
| DEX0477_022.nt.1 | 41937.0 | 45.5 | 76.9 | 40.0 | 66.7 | 50.0 | 85.7 |
| DEX0477_022.nt.1 | 41937.1 | 45.5 | 76.9 | 40.0 | 66.7 | 50.0 | 85.7 |
| DEX0477_022.nt.1 | 41937.2 | 45.5 | 66.7 | 40.0 | 57.1 | 50.0 | 75.0 |
| DEX0477_022.nt.1 | 41939.0 | 45.5 | 45.5 | 40.0 | 40.0 | 50.0 | 50.0 |
| DEX0477_022.nt.1 | 41939.1 | 45.5 | 47.6 | 40.0 | 44.4 | 50.0 | 50.0 |
| DEX0477_022.nt.1 | 41939.2 | 45.5 | 45.5 | 40.0 | 40.0 | 50.0 | 50.0 |
| DEX0477_022.nt.1 | 41940.0 | 45.5 | 45.5 | 40.0 | 40.0 | 50.0 | 50.0 |
| DEX0477_022.nt.1 | 41940.1 | 45.5 | 45.5 | 40.0 | 40.0 | 50.0 | 50.0 |
| DEX0477_022.nt.1 | 41940.2 | 45.5 | 45.5 | 40.0 | 40.0 | 50.0 | 50.0 |
| DEX0477_022.nt.1 | 78627.0 | 45.5 | 76.9 | 40.0 | 66.7 | 50.0 | 85.7 |
| DEX0477_022.nt.1 | 78627.1 | 40.9 | 69.2 | 30.0 | 50.0 | 50.0 | 85.7 |
| DEX0477_022.nt.1 | 78628.0 | 40.9 | 81.8 | 30.0 | 75.0 | 50.0 | 85.7 |
| DEX0477_022.nt.1 | 78628.1 | 45.5 | 76.9 | 40.0 | 66.7 | 50.0 | 85.7 |
| DEX0477_023.nt.1 | 33088.0 | 31.8 | 31.8 | 20.0 | 20.0 | 41.7 | 41.7 |
| DEX0477_023.nt.1 | 33088.1 | 27.3 | 27.3 | 20.0 | 20.0 | 33.3 | 33.3 |
| DEX0477_023.nt.1 | 33088.2 | 31.8 | 31.8 | 20.0 | 20.0 | 41.7 | 41.7 |
| DEX0477_023.nt.1 | 33088.3 | 27.3 | 27.3 | 10.0 | 10.0 | 41.7 | 41.7 |
| DEX0477_024.nt.1 | 26770.0 | 22.7 | 22.7 | 10.0 | 10.0 | 33.3 | 33.3 |
| DEX0477_024.nt.1 | 26770.1 | 22.7 | 22.7 | 10.0 | 10.0 | 33.3 | 33.3 |
| DEX0477_024.nt.1 | 26771.0 | 22.7 | 22.7 | 10.0 | 10.0 | 33.3 | 33.3 |
| DEX0477_024.nt.1 | 26771.1 | 22.7 | 22.7 | 10.0 | 10.0 | 33.3 | 33.3 |
| DEX0477_024.nt.1 | 41945.0 | 22.7 | 23.8 | 10.0 | 11.1 | 33.3 | 33.3 |
| DEX0477_024.nt.1 | 41945.1 | 27.3 | 27.3 | 20.0 | 20.0 | 33.3 | 33.3 |
| DEX0477_024.nt.1 | 41945.2 | 22.7 | 23.8 | 10.0 | 11.1 | 33.3 | 33.3 |
| DEX0477_024.nt.1 | 41945.3 | 22.7 | 22.7 | 10.0 | 10.0 | 33.3 | 33.3 |
| DEX0477_024.nt.1 | 41945.4 | 22.7 | 22.7 | 10.0 | 10.0 | 33.3 | 33.3 |
| DEX0477_024.nt.1 | 41946.0 | 22.7 | 25.0 | 10.0 | 12.5 | 33.3 | 33.3 |
| DEX0477_024.nt.1 | 41946.1 | 22.7 | 22.7 | 10.0 | 10.0 | 33.3 | 33.3 |
| DEX0477_024.nt.1 | 41946.2 | 22.7 | 22.7 | 10.0 | 10.0 | 33.3 | 33.3 |
| DEX0477_024.nt.1 | 41946.3 | 22.7 | 22.7 | 10.0 | 10.0 | 33.3 | 33.3 |
| DEX0477_024.nt.1 | 41946.4 | 22.7 | 22.7 | 10.0 | 10.0 | 33.3 | 33.3 |
| DEX0477_024.nt.2 | 26770.0 | 22.7 | 22.7 | 10.0 | 10.0 | 33.3 | 33.3 |
| DEX0477_024.nt.2 | 26770.1 | 22.7 | 22.7 | 10.0 | 10.0 | 33.3 | 33.3 |
| DEX0477_024.nt.2 | 26771.0 | 22.7 | 22.7 | 10.0 | 10.0 | 33.3 | 33.3 |
| DEX0477_024.nt.2 | 26771.1 | 22.7 | 22.7 | 10.0 | 10.0 | 33.3 | 33.3 |
| DEX0477_024.nt.2 | 41945.0 | 22.7 | 23.8 | 10.0 | 11.1 | 33.3 | 33.3 |
| DEX0477_024.nt.2 | 41945.1 | 27.3 | 27.3 | 20.0 | 20.0 | 33.3 | 33.3 |
| DEX0477_024.nt.2 | 41945.2 | 22.7 | 23.8 | 10.0 | 11.1 | 33.3 | 33.3 |
| DEX0477_024.nt.2 | 41945.3 | 22.7 | 22.7 | 10.0 | 10.0 | 33.3 | 33.3 |
| DEX0477_024.nt.2 | 41945.4 | 22.7 | 22.7 | 10.0 | 10.0 | 33.3 | 33.3 |
| DEX0477_024.nt.2 | 41946.0 | 22.7 | 25.0 | 10.0 | 12.5 | 33.3 | 33.3 |
| DEX0477_024.nt.2 | 41946.1 | 22.7 | 22.7 | 10.0 | 10.0 | 33.3 | 33.3 |
| DEX0477_024.nt.2 | 41946.2 | 22.7 | 22.7 | 10.0 | 10.0 | 33.3 | 33.3 |
| DEX0477_024.nt.2 | 41946.3 | 22.7 | 22.7 | 10.0 | 10.0 | 33.3 | 33.3 |
| DEX0477_024.nt.2 | 41946.4 | 22.7 | 22.7 | 10.0 | 10.0 | 33.3 | 33.3 |
| DEX0477_024.nt.3 | 26770.0 | 22.7 | 22.7 | 10.0 | 10.0 | 33.3 | 33.3 |
| DEX0477_024.nt.3 | 26770.1 | 22.7 | 22.7 | 10.0 | 10.0 | 33.3 | 33.3 |
| DEX0477_024.nt.3 | 26771.0 | 22.7 | 22.7 | 10.0 | 10.0 | 33.3 | 33.3 |
| DEX0477_024.nt.3 | 26771.1 | 22.7 | 22.7 | 10.0 | 10.0 | 33.3 | 33.3 |
| DEX0477_024.nt.3 | 41945.0 | 22.7 | 23.8 | 10.0 | 11.1 | 33.3 | 33.3 |
| DEX0477_024.nt.3 | 41945.1 | 27.3 | 27.3 | 20.0 | 20.0 | 33.3 | 33.3 |
| DEX0477_024.nt.3 | 41945.2 | 22.7 | 23.8 | 10.0 | 11.1 | 33.3 | 33.3 |
| DEX0477_024.nt.3 | 41945.3 | 22.7 | 22.7 | 10.0 | 10.0 | 33.3 | 33.3 |
| DEX0477_024.nt.3 | 41945.4 | 22.7 | 22.7 | 10.0 | 10.0 | 33.3 | 33.3 |
| DEX0477_024.nt.3 | 41946.0 | 22.7 | 25.0 | 10.0 | 12.5 | 33.3 | 33.3 |
| DEX0477_024.nt.3 | 41946.1 | 22.7 | 22.7 | 10.0 | 10.0 | 33.3 | 33.3 |
| DEX0477_024.nt.3 | 41946.2 | 22.7 | 22.7 | 10.0 | 10.0 | 33.3 | 33.3 |
| DEX0477_024.nt.3 | 41946.3 | 22.7 | 22.7 | 10.0 | 10.0 | 33.3 | 33.3 |
| DEX0477_024.nt.3 | 41946.4 | 22.7 | 22.7 | 10.0 | 10.0 | 33.3 | 33.3 |
| DEX0477_024.nt.4 | 26770.0 | 22.7 | 22.7 | 10.0 | 10.0 | 33.3 | 33.3 |
| DEX0477_024.nt.4 | 26770.1 | 22.7 | 22.7 | 10.0 | 10.0 | 33.3 | 33.3 |
| DEX0477_024.nt.4 | 41945.0 | 22.7 | 23.8 | 10.0 | 11.1 | 33.3 | 33.3 |
| DEX0477_024.nt.4 | 41945.1 | 27.3 | 27.3 | 20.0 | 20.0 | 33.3 | 33.3 |
| DEX0477_024.nt.4 | 41945.2 | 22.7 | 23.8 | 10.0 | 11.1 | 33.3 | 33.3 |
| DEX0477_024.nt.4 | 41945.3 | 22.7 | 22.7 | 10.0 | 10.0 | 33.3 | 33.3 |
| DEX0477_024.nt.4 | 41945.4 | 22.7 | 22.7 | 10.0 | 10.0 | 33.3 | 33.3 |
| DEX0477_024.nt.4 | 41946.0 | 22.7 | 25.0 | 10.0 | 12.5 | 33.3 | 33.3 |
| DEX0477_024.nt.4 | 41946.1 | 22.7 | 22.7 | 10.0 | 10.0 | 33.3 | 33.3 |
| DEX0477_024.nt.4 | 41946.2 | 22.7 | 22.7 | 10.0 | 10.0 | 33.3 | 33.3 |
| DEX0477_024.nt.4 | 41946.3 | 22.7 | 22.7 | 10.0 | 10.0 | 33.3 | 33.3 |
| DEX0477_024.nt.4 | 41946.4 | 22.7 | 22.7 | 10.0 | 10.0 | 33.3 | 33.3 |
| DEX0477_033.nt.1 | 19534.0 | 31.8 | 46.7 | 40.0 | 57.1 | 25.0 | 37.5 |
| DEX0477_033.nt.1 | 19534.1 | 31.8 | 46.7 | 40.0 | 57.1 | 25.0 | 37.5 |
| DEX0477_033.nt.1 | 19535.0 | 31.8 | 41.2 | 40.0 | 57.1 | 25.0 | 30.0 |
| DEX0477_033.nt.1 | 19535.1 | 31.8 | 38.9 | 40.0 | 50.0 | 25.0 | 30.0 |
| DEX0477_033.nt.1 | 41957.0 | 31.8 | 35.0 | 40.0 | 40.0 | 25.0 | 30.0 |
| DEX0477_033.nt.1 | 41957.1 | 27.3 | 30.0 | 30.0 | 33.3 | 25.0 | 27.3 |
| DEX0477_033.nt.1 | 41957.2 | 27.3 | 33.3 | 30.0 | 42.9 | 25.0 | 27.3 |
| DEX0477_033.nt.1 | 41958.0 | 27.3 | 28.6 | 30.0 | 30.0 | 25.0 | 27.3 |
| DEX0477_033.nt.1 | 41958.1 | 31.8 | 33.3 | 40.0 | 40.0 | 25.0 | 27.3 |
| DEX0477_033.nt.1 | 41958.2 | 31.8 | 35.0 | 40.0 | 44.4 | 25.0 | 27.3 |
| DEX0477_033.nt.2 | 19534.0 | 31.8 | 46.7 | 40.0 | 57.1 | 25.0 | 37.5 |
| DEX0477_033.nt.2 | 19534.1 | 31.8 | 46.7 | 40.0 | 57.1 | 25.0 | 37.5 |
| DEX0477_033.nt.2 | 19535.0 | 31.8 | 41.2 | 40.0 | 57.1 | 25.0 | 30.0 |
| DEX0477_033.nt.2 | 19535.1 | 31.8 | 38.9 | 40.0 | 50.0 | 25.0 | 30.0 |
| DEX0477_033.nt.2 | 41957.0 | 31.8 | 35.0 | 40.0 | 40.0 | 25.0 | 30.0 |
| DEX0477_033.nt.2 | 41957.1 | 27.3 | 30.0 | 30.0 | 33.3 | 25.0 | 27.3 |
| DEX0477_033.nt.2 | 41957.2 | 27.3 | 33.3 | 30.0 | 42.9 | 25.0 | 27.3 |
| DEX0477_033.nt.2 | 41958.0 | 27.3 | 28.6 | 30.0 | 30.0 | 25.0 | 27.3 |
| DEX0477_033.nt.2 | 41958.1 | 31.8 | 33.3 | 40.0 | 40.0 | 25.0 | 27.3 |
| DEX0477_033.nt.2 | 41958.2 | 31.8 | 35.0 | 40.0 | 44.4 | 25.0 | 27.3 |
| DEX0477_033.nt.3 | 19534.0 | 31.8 | 46.7 | 40.0 | 57.1 | 25.0 | 37.5 |
| DEX0477_033.nt.3 | 19534.1 | 31.8 | 46.7 | 40.0 | 57.1 | 25.0 | 37.5 |
| DEX0477_033.nt.3 | 19535.0 | 31.8 | 41.2 | 40.0 | 57.1 | 25.0 | 30.0 |
| DEX0477_033.nt.3 | 19535.1 | 31.8 | 38.9 | 40.0 | 50.0 | 25.0 | 30.0 |
| DEX0477_033.nt.3 | 41957.0 | 31.8 | 35.0 | 40.0 | 40.0 | 25.0 | 30.0 |
| DEX0477_033.nt.3 | 41957.1 | 27.3 | 30.0 | 30.0 | 33.3 | 25.0 | 27.3 |
| DEX0477_033.nt.3 | 41957.2 | 27.3 | 33.3 | 30.0 | 42.9 | 25.0 | 27.3 |
| DEX0477_033.nt.3 | 41958.0 | 27.3 | 28.6 | 30.0 | 30.0 | 25.0 | 27.3 |
| DEX0477_033.nt.3 | 41958.1 | 31.8 | 33.3 | 40.0 | 40.0 | 25.0 | 27.3 |
| DEX0477_033.nt.3 | 41958.2 | 31.8 | 35.0 | 40.0 | 44.4 | 25.0 | 27.3 |
| DEX0477_036.nt.1 | 2371.0 | 72.7 | 72.7 | 90.0 | 90.0 | 58.3 | 58.3 |
| DEX0477_036.nt.1 | 2406.0 | 72.7 | 72.7 | 90.0 | 90.0 | 58.3 | 58.3 |
| DEX0477_036.nt.1 | 2442.0 | 72.7 | 72.7 | 90.0 | 90.0 | 58.3 | 58.3 |
| DEX0477_036.nt.1 | 3111.0 | 68.2 | 68.2 | 90.0 | 90.0 | 50.0 | 50.0 |
| DEX0477_042.nt.1 | 3383.0 | 31.8 | 31.8 | 0.0 | 0.0 | 58.3 | 58.3 |
| DEX0477_046.nt.1 | 1551.0 | 31.8 | 31.8 | 30.0 | 30.0 | 33.3 | 33.3 |
| DEX0477_047.nt.1 | 452.0 | 45.5 | 50.0 | 60.0 | 66.7 | 33.3 | 36.4 |
| DEX0477_048.nt.1 | 33514.0 | 18.2 | 30.8 | 10.0 | 20.0 | 25.0 | 37.5 |
| DEX0477_048.nt.1 | 33514.1 | 18.2 | 30.8 | 10.0 | 20.0 | 25.0 | 37.5 |
| DEX0477_048.nt.1 | 33515.0 | 13.6 | 15.0 | 0.0 | 0.0 | 25.0 | 25.0 |
| DEX0477_048.nt.1 | 33515.1 | 13.6 | 15.8 | 10.0 | 12.5 | 16.7 | 18.2 |
| DEX0477_048.nt.2 | 33514.0 | 18.2 | 30.8 | 10.0 | 20.0 | 25.0 | 37.5 |
| DEX0477_048.nt.2 | 33514.1 | 18.2 | 30.8 | 10.0 | 20.0 | 25.0 | 37.5 |
| DEX0477_048.nt.2 | 33515.0 | 13.6 | 15.0 | 0.0 | 0.0 | 25.0 | 25.0 |
| DEX0477_048.nt.3 | 33515.1 | 13.6 | 15.8 | 10.0 | 12.5 | 16.7 | 18.2 |
| DEX0477_048.nt.3 | 33514.0 | 18.2 | 30.8 | 10.0 | 20.0 | 25.0 | 37.5 |
| DEX0477_048.nt.3 | 33514.1 | 18.2 | 30.8 | 10.0 | 20.0 | 25.0 | 37.5 |
| DEX0477_048.nt.3 | 33515.0 | 13.6 | 15.0 | 0.0 | 0.0 | 25.0 | 25.0 |
| DEX0477_048.nt.3 | 33515.1 | 13.6 | 15.8 | 10.0 | 12.5 | 16.7 | 18.2 |
| DEX0477_048.nt.4 | 33514.0 | 18.2 | 30.8 | 10.0 | 20.0 | 25.0 | 37.5 |
| DEX0477_048.nt.4 | 33514.1 | 18.2 | 30.8 | 10.0 | 20.0 | 25.0 | 37.5 |
| DEX0477_048.nt.4 | 33515.0 | 13.6 | 15.0 | 0.0 | 0.0 | 25.0 | 25.0 |
| DEX0477_048.nt.4 | 33515.1 | 13.6 | 15.8 | 10.0 | 12.5 | 16.7 | 18.2 |
| DEX0477_051.nt.1 | 3081.0 | 45.5 | 45.5 | 60.0 | 60.0 | 33.3 | 33.3 |
| DEX0477_052.nt.1 | 10766.0 | 59.1 | 72.2 | 70.0 | 87.5 | 50.0 | 60.0 |
| DEX0477_052.nt.1 | 10766.1 | 59.1 | 72.2 | 70.0 | 87.5 | 50.0 | 60.0 |
| DEX0477_052.nt.1 | 10767.0 | 59.1 | 72.2 | 70.0 | 77.8 | 50.0 | 66.7 |
| DEX0477_052.nt.1 | 10767.1 | 59.1 | 65.0 | 70.0 | 77.8 | 50.0 | 54.5 |
| DEX0477_054.nt.1 | 9340.0 | 54.5 | 54.5 | 80.0 | 80.0 | 33.3 | 33.3 |
| DEX0477_054.nt.1 | 9340.1 | 50.0 | 50.0 | 70.0 | 70.0 | 33.3 | 33.3 |
| DEX0477_054.nt.2 | 9341.0 | 50.0 | 50.0 | 70.0 | 70.0 | 33.3 | 33.3 |
| DEX0477_054.nt.2 | 9341.1 | 45.5 | 45.5 | 60.0 | 60.0 | 33.3 | 33.3 |
| DEX0477_055.nt.1 | 5612.0 | 18.2 | 18.2 | 30.0 | 30.0 | 8.3 | 8.3 |
| DEX0477_055.nt.2 | 5612.0 | 18.2 | 18.2 | 30.0 | 30.0 | 8.3 | 8.3 |
| DEX0477_055.nt.3 | 5612.0 | 18.2 | 18.2 | 30.0 | 30.0 | 8.3 | 8.3 |
| DEX0477_055.nt.4 | 5612.0 | 18.2 | 18.2 | 30.0 | 30.0 | 8.3 | 8.3 |
| DEX0477_057.nt.1 | 28971.0 | 18.2 | 18.2 | 30.0 | 30.0 | 8.3 | 8.3 |
| DEX0477_057.nt.1 | 28971.1 | 18.2 | 18.2 | 30.0 | 30.0 | 8.3 | 8.3 |
| DEX0477_057.nt.1 | 28972.0 | 31.8 | 31.8 | 40.0 | 40.0 | 25.0 | 25.0 |
| DEX0477_057.nt.1 | 28972.1 | 27.3 | 27.3 | 30.0 | 30.0 | 25.0 | 25.0 |
| DEX0477_070.nt.1 | 3745.0 | 18.2 | 18.2 | 30.0 | 30.0 | 8.3 | 8.3 |
| DEX0477_076.nt.1 | 1383.0 | 13.6 | 13.6 | 30.0 | 30.0 | 0.0 | 0.0 |

[0593] Ovarian Cancer Chips

[0594] For ovarian cancer two different chip designs were evaluated with overlapping sets of a total of 19 samples, comparing the expression patterns of ovarian cancer derived total RNA to total RNA isolated from a pool of 9 normal ovarian tissues. For the Multi-Cancer Array Chip, all 19 samples (14 invasive carcinomas, 5 low malignant potential samples were analyzed and for the Ovarian Array Chip, a subset of 17 of these samples (13 invasive carcinomas, 4 low malignant potential samples) were assessed. The results for the statistically significant up-regulated genes on the Ovarian Array Chip are shown in Table(s) 18-19. The results for the statistically significant up-regulated genes on the Multi-Cancer Array Chip are shown in Table(s) 20-21. The first two columns of each table contain information about the sequence itself (DEX ID, Oligo Name), the next columns show the results obtained for all (“ALL”) ovarian cancer samples, invasive carcinomas (“IN”) and low malignant potential (“LMP”) samples. ‘% up’ indicates the percentage of all experiments in which up-regulation of at least 2-fold was observed (n=19 for the Multi-Cancer Array Chip, n=17 for the Ovarian Array Chip), ‘% valid up’ indicates the percentage of experiments with valid expression values in which up-regulation of at least 2-fold was observed. Additional experiments were performed, generally the results are only reported below if the data showed 30% or greater up-regulation in at least one of the experimental subsets.

TABLE 18

| | | Ovr | | Ovr | | Ovr | |
|---|---|---|---|---|---|---|---|
| | | ALL | Ovr ALL | INV | Ovr INV | LMP | Ovr LMP |
| | Oligo | % up | % valid up | % up | % valid up | % up | % valid |
| DEX ID | Name | n = 17 | n = 17 | n = 13 | n = 13 | n = 4 | up n = 4 |
| DEX0477_005.nt.1 | 18050.01 | 35.3 | 35.3 | 46.2 | 46.2 | 0.0 | 0.0 |
| DEX0477_005.nt.1 | 18050.02 | 35.3 | 35.3 | 46.2 | 46.2 | 0.0 | 0.0 |
| DEX0477_005.nt.1 | 18088.01 | 23.5 | 23.5 | 30.8 | 30.8 | 0.0 | 0.0 |
| DEX0477_005.nt.1 | 18088.02 | 23.5 | 23.5 | 30.8 | 30.8 | 0.0 | 0.0 |
| DEX0477_006.nt.1 | 9744.01 | 58.8 | 58.8 | 69.2 | 69.2 | 25.0 | 25.0 |
| DEX0477_006.nt.1 | 9744.02 | 58.8 | 58.8 | 69.2 | 69.2 | 25.0 | 25.0 |
| DEX0477_007.nt.1 | 18644.01 | 47.1 | 72.7 | 46.2 | 66.7 | 50.0 | 100.0 |
| DEX0477_007.nt.1 | 18644.02 | 47.1 | 72.7 | 38.5 | 62.5 | 75.0 | 100.0 |
| DEX0477_010.nt.1 | 17464.01 | 29.4 | 29.4 | 38.5 | 38.5 | 0.0 | 0.0 |
| DEX0477_010.nt.1 | 17464.02 | 29.4 | 29.4 | 38.5 | 38.5 | 0.0 | 0.0 |
| DEX0477_010.nt.1 | 18050.01 | 35.3 | 35.3 | 46.2 | 46.2 | 0.0 | 0.0 |
| DEX0477_010.nt.1 | 18050.02 | 35.3 | 35.3 | 46.2 | 46.2 | 0.0 | 0.0 |
| DEX0477_010.nt.1 | 18088.01 | 23.5 | 23.5 | 30.8 | 30.8 | 0.0 | 0.0 |
| DEX0477_010.nt.1 | 18088.02 | 23.5 | 23.5 | 30.8 | 30.8 | 0.0 | 0.0 |
| DEX0477_010.nt.1 | 18094.01 | 52.9 | 52.9 | 69.2 | 69.2 | 0.0 | 0.0 |
| DEX0477_010.nt.1 | 18094.02 | 52.9 | 52.9 | 69.2 | 69.2 | 0.0 | 0.0 |
| DEX0477_012.nt.1 | 16966.01 | 29.4 | 29.4 | 38.5 | 38.5 | 0.0 | 0.0 |
| DEX0477_012.nt.1 | 16966.02 | 29.4 | 29.4 | 38.5 | 38.5 | 0.0 | 0.0 |
| DEX0477_012.nt.1 | 22433.01 | 29.4 | 29.4 | 38.5 | 38.5 | 0.0 | 0.0 |
| DEX0477_012.nt.1 | 22433.02 | 29.4 | 29.4 | 38.5 | 38.5 | 0.0 | 0.0 |
| DEX0477_013.nt.1 | 10548.01 | 35.3 | 35.3 | 38.5 | 38.5 | 25.0 | 25.0 |
| DEX0477_013.nt.1 | 10548.02 | 35.3 | 35.3 | 38.5 | 38.5 | 25.0 | 25.0 |
| DEX0477_013.nt.1 | 14426.01 | 17.6 | 18.8 | 15.4 | 16.7 | 25.0 | 25.0 |
| DEX0477_013.nt.1 | 14426.02 | 11.8 | 11.8 | 7.7 | 7.7 | 25.0 | 25.0 |
| DEX0477_016.nt.1 | 37143.01 | 76.5 | 76.5 | 76.9 | 76.9 | 75.0 | 75.0 |
| DEX0477_016.nt.1 | 37143.02 | 76.5 | 76.5 | 76.9 | 76.9 | 75.0 | 75.0 |
| DEX0477_016.nt.2 | 37143.01 | 76.5 | 76.5 | 76.9 | 76.9 | 75.0 | 75.0 |
| DEX0477_016.nt.2 | 37143.02 | 76.5 | 76.5 | 76.9 | 76.9 | 75.0 | 75.0 |
| DEX0477_016.nt.4 | 37143.01 | 76.5 | 76.5 | 76.9 | 76.9 | 75.0 | 75.0 |
| DEX0477_016.nt.4 | 37143.02 | 76.5 | 76.5 | 76.9 | 76.9 | 75.0 | 75.0 |
| DEX0477_016.nt.5 | 37143.01 | 76.5 | 76.5 | 76.9 | 76.9 | 75.0 | 75.0 |
| DEX0477_016.nt.5 | 37143.02 | 76.5 | 76.5 | 76.9 | 76.9 | 75.0 | 75.0 |
| DEX0477_019.nt.1 | 41937.01 | 29.4 | 55.6 | 15.4 | 33.3 | 75.0 | 100.0 |
| DEX0477_019.nt.1 | 41937.02 | 29.4 | 62.5 | 15.4 | 40.0 | 75.0 | 100.0 |
| DEX0477_020.nt.1 | 41937.01 | 29.4 | 55.6 | 15.4 | 33.3 | 75.0 | 100.0 |
| DEX0477_020.nt.1 | 41937.02 | 29.4 | 62.5 | 15.4 | 40.0 | 75.0 | 100.0 |
| DEX0477_020.nt.2 | 41937.01 | 29.4 | 55.6 | 15.4 | 33.3 | 75.0 | 100.0 |
| DEX0477_020.nt.2 | 41937.02 | 29.4 | 62.5 | 15.4 | 40.0 | 75.0 | 100.0 |
| DEX0477_021.nt.1 | 33088.01 | 52.9 | 60.0 | 38.5 | 45.5 | 100.0 | 100.0 |
| DEX0477_021.nt.1 | 33088.02 | 52.9 | 56.2 | 38.5 | 41.7 | 100.0 | 100.0 |
| DEX0477_021.nt.2 | 33088.01 | 52.9 | 60.0 | 38.5 | 45.5 | 100.0 | 100.0 |
| DEX0477_021.nt.2 | 33088.02 | 52.9 | 56.2 | 38.5 | 41.7 | 100.0 | 100.0 |
| DEX0477_022.nt.1 | 41937.01 | 29.4 | 55.6 | 15.4 | 33.3 | 75.0 | 100.0 |
| DEX0477_022.nt.1 | 41937.02 | 29.4 | 62.5 | 15.4 | 40.0 | 75.0 | 100.0 |
| DEX0477_023.nt.1 | 33088.01 | 52.9 | 60.0 | 38.5 | 45.5 | 100.0 | 100.0 |
| DEX0477_023.nt.1 | 33088.02 | 52.9 | 56.2 | 38.5 | 41.7 | 100.0 | 100.0 |
| DEX0477_025.nt.1 | 10702.01 | 94.1 | 94.1 | 92.3 | 92.3 | 100.0 | 100.0 |
| DEX0477_025.nt.1 | 10702.02 | 94.1 | 94.1 | 92.3 | 92.3 | 100.0 | 100.0 |
| DEX0477_025.nt.1 | 18214.01 | 94.1 | 94.1 | 92.3 | 92.3 | 100.0 | 100.0 |
| DEX0477_025.nt.1 | 18214.02 | 88.2 | 93.8 | 84.6 | 91.7 | 100.0 | 100.0 |
| DEX0477_026.nt.1 | 16123.01 | 29.4 | 31.2 | 30.8 | 33.3 | 25.0 | 25.0 |
| DEX0477_026.nt.1 | 16123.02 | 29.4 | 33.3 | 30.8 | 36.4 | 25.0 | 25.0 |
| DEX0477_028.nt.1 | 10454.01 | 41.2 | 41.2 | 53.8 | 53.8 | 0.0 | 0.0 |
| DEX0477_028.nt.1 | 10454.02 | 41.2 | 41.2 | 53.8 | 53.8 | 0.0 | 0.0 |
| DEX0477_028.nt.2 | 10454.01 | 41.2 | 41.2 | 53.8 | 53.8 | 0.0 | 0.0 |
| DEX0477_028.nt.2 | 10454.02 | 41.2 | 41.2 | 53.8 | 53.8 | 0.0 | 0.0 |
| DEX0477_028.nt.3 | 10454.01 | 41.2 | 41.2 | 53.8 | 53.8 | 0.0 | 0.0 |
| DEX0477_028.nt.3 | 10454.02 | 41.2 | 41.2 | 53.8 | 53.8 | 0.0 | 0.0 |
| DEX0477_028.nt.4 | 10454.01 | 41.2 | 41.2 | 53.8 | 53.8 | 0.0 | 0.0 |
| DEX0477_028.nt.4 | 10454.02 | 41.2 | 41.2 | 53.8 | 53.8 | 0.0 | 0.0 |
| DEX0477_032.nt.1 | 11307.01 | 23.5 | 23.5 | 30.8 | 30.8 | 0.0 | 0.0 |
| DEX0477_032.nt.1 | 11307.02 | 23.5 | 23.5 | 30.8 | 30.8 | 0.0 | 0.0 |
| DEX0477_032.nt.1 | 21709.01 | 5.9 | 6.2 | 7.7 | 8.3 | 0.0 | 0.0 |
| DEX0477_032.nt.1 | 21709.02 | 17.6 | 17.6 | 23.1 | 23.1 | 0.0 | 0.0 |
| DEX0477_032.nt.1 | 21779.01 | 23.5 | 23.5 | 30.8 | 30.8 | 0.0 | 0.0 |
| DEX0477_032.nt.1 | 21779.02 | 23.5 | 23.5 | 30.8 | 30.8 | 0.0 | 0.0 |
| DEX0477_032.nt.1 | 22353.01 | 5.9 | 6.7 | 7.7 | 9.1 | 0.0 | 0.0 |
| DEX0477_032.nt.1 | 22353.02 | 17.6 | 23.1 | 23.1 | 27.3 | 0.0 | 0.0 |
| DEX0477_033.nt.1 | 19534.01 | 11.8 | 20.0 | 0.0 | 0.0 | 50.0 | 66.7 |
| DEX0477_033.nt.1 | 19534.02 | 23.5 | 28.6 | 7.7 | 9.1 | 75.0 | 100.0 |
| DEX0477_033.nt.1 | 21523.01 | 17.6 | 17.6 | 7.7 | 7.7 | 50.0 | 50.0 |
| DEX0477_033.nt.1 | 21523.02 | 11.8 | 14.3 | 0.0 | 0.0 | 50.0 | 50.0 |
| DEX0477_033.nt.1 | 24504.01 | 17.6 | 23.1 | 0.0 | 0.0 | 75.0 | 75.0 |
| DEX0477_033.nt.1 | 24504.02 | 23.5 | 33.3 | 7.7 | 11.1 | 75.0 | 100.0 |
| DEX0477_033.nt.2 | 19534.01 | 11.8 | 20.0 | 0.0 | 0.0 | 50.0 | 66.7 |
| DEX0477_033.nt.2 | 19534.02 | 23.5 | 28.6 | 7.7 | 9.1 | 75.0 | 100.0 |
| DEX0477_033.nt.2 | 21523.01 | 17.6 | 17.6 | 7.7 | 7.7 | 50.0 | 50.0 |
| DEX0477_033.nt.2 | 21523.02 | 11.8 | 14.3 | 0.0 | 0.0 | 50.0 | 50.0 |
| DEX0477_033.nt.2 | 24504.01 | 17.6 | 23.1 | 0.0 | 0.0 | 75.0 | 75.0 |
| DEX0477_033.nt.2 | 24504.02 | 23.5 | 33.3 | 7.7 | 11.1 | 75.0 | 100.0 |
| DEX0477_033.nt.3 | 19534.01 | 11.8 | 20.0 | 0.0 | 0.0 | 50.0 | 66.7 |
| DEX0477_033.nt.3 | 19534.02 | 23.5 | 28.6 | 7.7 | 9.1 | 75.0 | 100.0 |
| DEX0477_033.nt.3 | 21523.01 | 17.6 | 17.6 | 7.7 | 7.7 | 50.0 | 50.0 |
| DEX0477_033.nt.3 | 21523.02 | 11.8 | 14.3 | 0.0 | 0.0 | 50.0 | 50.0 |
| DEX0477_033.nt.3 | 24504.01 | 17.6 | 23.1 | 0.0 | 0.0 | 75.0 | 75.0 |
| DEX0477_033.nt.3 | 24504.02 | 23.5 | 33.3 | 7.7 | 11.1 | 75.0 | 100.0 |
| DEX0477_037.nt.1 | 17118.01 | 17.6 | 17.6 | 23.1 | 23.1 | 0.0 | 0.0 |
| DEX0477_037.nt.1 | 17118.02 | 23.5 | 23.5 | 30.8 | 30.8 | 0.0 | 0.0 |
| DEX0477_038.nt.1 | 18212.01 | 82.4 | 93.3 | 84.6 | 100.0 | 75.0 | 75.0 |
| DEX0477_038.nt.1 | 18212.02 | 70.6 | 92.3 | 76.9 | 100.0 | 50.0 | 66.7 |
| DEX0477_038.nt.2 | 18212.01 | 82.4 | 93.3 | 84.6 | 100.0 | 75.0 | 75.0 |
| DEX0477_038.nt.2 | 18212.02 | 70.6 | 92.3 | 76.9 | 100.0 | 50.0 | 66.7 |
| DEX0477_038.nt.3 | 18212.01 | 82.4 | 93.3 | 84.6 | 100.0 | 75.0 | 75.0 |
| DEX0477_038.nt.3 | 18212.02 | 70.6 | 92.3 | 76.9 | 100.0 | 50.0 | 66.7 |
| DEX0477_040.nt.1 | 19274.01 | 35.3 | 35.3 | 38.5 | 38.5 | 25.0 | 25.0 |
| DEX0477_040.nt.1 | 19274.02 | 23.5 | 23.5 | 30.8 | 30.8 | 0.0 | 0.0 |
| DEX0477_040.nt.2 | 19274.01 | 35.3 | 35.3 | 38.5 | 38.5 | 25.0 | 25.0 |
| DEX0477_040.nt.2 | 19274.02 | 23.5 | 23.5 | 30.8 | 30.8 | 0.0 | 0.0 |
| DEX0477_041.nt.1 | 11295.01 | 35.3 | 35.3 | 23.1 | 23.1 | 75.0 | 75.0 |
| DEX0477_041.nt.1 | 11295.02 | 29.4 | 29.4 | 15.4 | 15.4 | 75.0 | 75.0 |
| DEX0477_043.nt.1 | 18480.01 | 88.2 | 88.2 | 92.3 | 92.3 | 75.0 | 75.0 |
| DEX0477_043.nt.1 | 18480.02 | 88.2 | 88.2 | 92.3 | 92.3 | 75.0 | 75.0 |
| DEX0477_043.nt.1 | 18496.01 | 11.8 | 12.5 | 15.4 | 15.4 | 0.0 | 0.0 |
| DEX0477_043.nt.1 | 18496.02 | 11.8 | 11.8 | 15.4 | 15.4 | 0.0 | 0.0 |
| DEX0477_050.nt.1 | 18480.01 | 88.2 | 88.2 | 92.3 | 92.3 | 75.0 | 75.0 |
| DEX0477_050.nt.1 | 18480.02 | 88.2 | 88.2 | 92.3 | 92.3 | 75.0 | 75.0 |
| DEX0477_050.nt.1 | 18496.01 | 11.8 | 12.5 | 15.4 | 15.4 | 0.0 | 0.0 |
| DEX0477_050.nt.1 | 18496.02 | 11.8 | 11.8 | 15.4 | 15.4 | 0.0 | 0.0 |
| DEX0477_052.nt.1 | 10766.01 | 47.1 | 100.0 | 38.5 | 100.0 | 75.0 | 100.0 |
| DEX0477_052.nt.1 | 10766.02 | 52.9 | 90.0 | 46.2 | 85.7 | 75.0 | 100.0 |
| DEX0477_052.nt.1 | 21369.01 | 52.9 | 75.0 | 46.2 | 66.7 | 75.0 | 100.0 |
| DEX0477_052.nt.1 | 21369.02 | 52.9 | 81.8 | 46.2 | 75.0 | 75.0 | 100.0 |
| DEX0477_053.nt.1 | 18480.01 | 88.2 | 88.2 | 92.3 | 92.3 | 75.0 | 75.0 |
| DEX0477_053.nt.1 | 18480.02 | 88.2 | 88.2 | 92.3 | 92.3 | 75.0 | 75.0 |
| DEX0477_053.nt.1 | 18496.01 | 11.8 | 12.5 | 15.4 | 15.4 | 0.0 | 0.0 |
| DEX0477_053.nt.1 | 18496.02 | 11.8 | 11.8 | 15.4 | 15.4 | 0.0 | 0.0 |
| DEX0477_054.nt.1 | 9340.01 | 29.4 | 50.0 | 30.8 | 66.7 | 25.0 | 25.0 |
| DEX0477_054.nt.1 | 9340.02 | 47.1 | 66.7 | 46.2 | 75.0 | 50.0 | 50.0 |
| DEX0477_055.nt.1 | 20553.01 | 35.3 | 75.0 | 30.8 | 66.7 | 50.0 | 100.0 |
| DEX0477_055.nt.1 | 20553.02 | 41.2 | 70.0 | 30.8 | 57.1 | 75.0 | 100.0 |
| DEX0477_055.nt.2 | 20553.01 | 35.3 | 75.0 | 30.8 | 66.7 | 50.0 | 100.0 |
| DEX0477_055.nt.2 | 20553.02 | 41.2 | 70.0 | 30.8 | 57.1 | 75.0 | 100.0 |
| DEX0477_055.nt.2 | 20563.01 | 17.6 | 21.4 | 15.4 | 16.7 | 25.0 | 50.0 |
| DEX0477_055.nt.2 | 20563.02 | 17.6 | 20.0 | 15.4 | 16.7 | 25.0 | 33.3 |
| DEX0477_055.nt.3 | 20553.01 | 35.3 | 75.0 | 30.8 | 66.7 | 50.0 | 100.0 |
| DEX0477_055.nt.3 | 20553.02 | 41.2 | 70.0 | 30.8 | 57.1 | 75.0 | 100.0 |
| DEX0477_055.nt.3 | 20563.01 | 17.6 | 21.4 | 15.4 | 16.7 | 25.0 | 50.0 |
| DEX0477_055.nt.3 | 20563.02 | 17.6 | 20.0 | 15.4 | 16.7 | 25.0 | 33.3 |
| DEX0477_055.nt.4 | 20553.01 | 35.3 | 75.0 | 30.8 | 66.7 | 50.0 | 100.0 |
| DEX0477_055.nt.4 | 20553.02 | 41.2 | 70.0 | 30.8 | 57.1 | 75.0 | 100.0 |
| DEX0477_056.nt.1 | 19014.02 | 23.5 | 23.5 | 30.8 | 30.8 | 0.0 | 0.0 |
| DEX0477_080.nt.1 | 19274.01 | 35.3 | 35.3 | 38.5 | 38.5 | 25.0 | 25.0 |
| DEX0477_080.nt.1 | 19274.02 | 23.5 | 23.5 | 30.8 | 30.8 | 0.0 | 0.0 |

[0595] TABLE 19

| | | Ovr | | Ovr | | | |
|---|---|---|---|---|---|---|---|
| | | 550 | Ovr 550 | 550 | Ovr 550 | | Ovr 550 |
| | | ALL | ALL | INV | INV | Ovr 550 | LMP |
| | Oligo | % up | % valid | % up | % valid | LMP % up | % valid |
| DEX ID | Name | n = 17 | up n = 17 | n = 13 | up n = 13 | n = 4 | up n = 4 |
| DEX0477_005.nt.1 | 18050.01 | 35.3 | 35.3 | 46.2 | 46.2 | 0.0 | 0.0 |
| DEX0477_005.nt.1 | 18050.02 | 35.3 | 35.3 | 46.2 | 46.2 | 0.0 | 0.0 |
| DEX0477_005.nt.1 | 18088.01 | 23.5 | 23.5 | 30.8 | 30.8 | 0.0 | 0.0 |
| DEX0477_005.nt.1 | 18088.02 | 23.5 | 23.5 | 30.8 | 30.8 | 0.0 | 0.0 |
| DEX0477_006.nt.1 | 9744.01 | 64.7 | 64.7 | 76.9 | 76.9 | 25.0 | 25.0 |
| DEX0477_006.nt.1 | 9744.02 | 64.7 | 64.7 | 76.9 | 76.9 | 25.0 | 25.0 |
| DEX0477_007.nt.1 | 18644.01 | 17.6 | 60.0 | 15.4 | 50.0 | 25.0 | 100.0 |
| DEX0477_007.nt.1 | 18644.02 | 17.6 | 100.0 | 15.4 | 100.0 | 25.0 | 100.0 |
| DEX0477_010.nt.1 | 17464.01 | 29.4 | 29.4 | 38.5 | 38.5 | 0.0 | 0.0 |
| DEX0477_010.nt.1 | 17464.02 | 29.4 | 29.4 | 38.5 | 38.5 | 0.0 | 0.0 |
| DEX0477_010.nt.1 | 18050.01 | 35.3 | 35.3 | 46.2 | 46.2 | 0.0 | 0.0 |
| DEX0477_010.nt.1 | 18050.02 | 35.3 | 35.3 | 46.2 | 46.2 | 0.0 | 0.0 |
| DEX0477_010.nt.1 | 18088.01 | 23.5 | 23.5 | 30.8 | 30.8 | 0.0 | 0.0 |
| DEX0477_010.nt.1 | 18088.02 | 23.5 | 23.5 | 30.8 | 30.8 | 0.0 | 0.0 |
| DEX0477_010.nt.1 | 18094.01 | 52.9 | 52.9 | 69.2 | 69.2 | 0.0 | 0.0 |
| DEX0477_010.nt.1 | 18094.02 | 52.9 | 52.9 | 69.2 | 69.2 | 0.0 | 0.0 |
| DEX0477_012.nt.1 | 16966.01 | 29.4 | 29.4 | 38.5 | 38.5 | 0.0 | 0.0 |
| DEX0477_012.nt.1 | 16966.02 | 29.4 | 29.4 | 38.5 | 38.5 | 0.0 | 0.0 |
| DEX0477_012.nt.1 | 22433.01 | 29.4 | 29.4 | 38.5 | 38.5 | 0.0 | 0.0 |
| DEX0477_012.nt.1 | 22433.02 | 29.4 | 29.4 | 38.5 | 38.5 | 0.0 | 0.0 |
| DEX0477_013.nt.1 | 10548.01 | 35.3 | 40.0 | 38.5 | 41.7 | 25.0 | 33.3 |
| DEX0477_013.nt.1 | 10548.02 | 35.3 | 40.0 | 38.5 | 41.7 | 25.0 | 33.3 |
| DEX0477_013.nt.1 | 14426.01 | 11.8 | 13.3 | 7.7 | 9.1 | 25.0 | 25.0 |
| DEX0477_013.nt.1 | 14426.02 | 5.9 | 9.1 | 0.0 | 0.0 | 25.0 | 50.0 |
| DEX0477_016.nt.1 | 37143.01 | 70.6 | 70.6 | 69.2 | 69.2 | 75.0 | 75.0 |
| DEX0477_016.nt.1 | 37143.02 | 76.5 | 76.5 | 76.9 | 76.9 | 75.0 | 75.0 |
| DEX0477_016.nt.2 | 37143.01 | 70.6 | 70.6 | 69.2 | 69.2 | 75.0 | 75.0 |
| DEX0477_016.nt.2 | 37143.02 | 76.5 | 76.5 | 76.9 | 76.9 | 75.0 | 75.0 |
| DEX0477_016.nt.4 | 37143.01 | 70.6 | 70.6 | 69.2 | 69.2 | 75.0 | 75.0 |
| DEX0477_016.nt.4 | 37143.02 | 76.5 | 76.5 | 76.9 | 76.9 | 75.0 | 75.0 |
| DEX0477_016.nt.5 | 37143.01 | 70.6 | 70.6 | 69.2 | 69.2 | 75.0 | 75.0 |
| DEX0477_016.nt.5 | 37143.02 | 76.5 | 76.5 | 76.9 | 76.9 | 75.0 | 75.0 |
| DEX0477_019.nt.1 | 41937.01 | 23.5 | 100.0 | 7.7 | 100.0 | 75.0 | 100.0 |
| DEX0477_019.nt.1 | 41937.02 | 23.5 | 100.0 | 7.7 | 100.0 | 75.0 | 100.0 |
| DEX0477_020.nt.1 | 41937.01 | 23.5 | 100.0 | 7.7 | 100.0 | 75.0 | 100.0 |
| DEX0477_020.nt.1 | 41937.02 | 23.5 | 100.0 | 7.7 | 100.0 | 75.0 | 100.0 |
| DEX0477_020.nt.2 | 41937.01 | 23.5 | 100.0 | 7.7 | 100.0 | 75.0 | 100.0 |
| DEX0477_020.nt.2 | 41937.02 | 23.5 | 100.0 | 7.7 | 100.0 | 75.0 | 100.0 |
| DEX0477_021.nt.1 | 33088.01 | 52.9 | 81.8 | 38.5 | 71.4 | 100.0 | 100.0 |
| DEX0477_021.nt.1 | 33088.02 | 47.1 | 66.7 | 38.5 | 55.6 | 75.0 | 100.0 |
| DEX0477_021.nt.2 | 33088.01 | 52.9 | 81.8 | 38.5 | 71.4 | 100.0 | 100.0 |
| DEX0477_021.nt.2 | 33088.02 | 47.1 | 66.7 | 38.5 | 55.6 | 75.0 | 100.0 |
| DEX0477_022.nt.1 | 41937.01 | 23.5 | 100.0 | 7.7 | 100.0 | 75.0 | 100.0 |
| DEX0477_022.nt.1 | 41937.02 | 23.5 | 100.0 | 7.7 | 100.0 | 75.0 | 100.0 |
| DEX0477_023.nt.1 | 33088.01 | 52.9 | 81.8 | 38.5 | 71.4 | 100.0 | 100.0 |
| DEX0477_023.nt.1 | 33088.02 | 47.1 | 66.7 | 38.5 | 55.6 | 75.0 | 100.0 |
| DEX0477_025.nt.1 | 10702.01 | 94.1 | 94.1 | 92.3 | 92.3 | 100.0 | 100.0 |
| DEX0477_025.nt.1 | 10702.02 | 94.1 | 94.1 | 92.3 | 92.3 | 100.0 | 100.0 |
| DEX0477_025.nt.1 | 18214.01 | 94.1 | 94.1 | 92.3 | 92.3 | 100.0 | 100.0 |
| DEX0477_025.nt.1 | 18214.02 | 88.2 | 93.8 | 84.6 | 91.7 | 100.0 | 100.0 |
| DEX0477_026.nt.1 | 16123.01 | 29.4 | 33.3 | 30.8 | 36.4 | 25.0 | 25.0 |
| DEX0477_026.nt.1 | 16123.02 | 29.4 | 35.7 | 30.8 | 40.0 | 25.0 | 25.0 |
| DEX0477_028.nt.1 | 10454.01 | 41.2 | 41.2 | 53.8 | 53.8 | 0.0 | 0.0 |
| DEX0477_028.nt.1 | 10454.02 | 41.2 | 41.2 | 53.8 | 53.8 | 0.0 | 0.0 |
| DEX0477_028.nt.2 | 10454.01 | 41.2 | 41.2 | 53.8 | 53.8 | 0.0 | 0.0 |
| DEX0477_028.nt.2 | 10454.02 | 41.2 | 41.2 | 53.8 | 53.8 | 0.0 | 0.0 |
| DEX0477_028.nt.3 | 10454.01 | 41.2 | 41.2 | 53.8 | 53.8 | 0.0 | 0.0 |
| DEX0477_028.nt.3 | 10454.02 | 41.2 | 41.2 | 53.8 | 53.8 | 0.0 | 0.0 |
| DEX0477_028.nt.4 | 10454.01 | 41.2 | 41.2 | 53.8 | 53.8 | 0.0 | 0.0 |
| DEX0477_028.nt.4 | 10454.02 | 41.2 | 41.2 | 53.8 | 53.8 | 0.0 | 0.0 |
| DEX0477_032.nt.1 | 11307.01 | 23.5 | 23.5 | 30.8 | 30.8 | 0.0 | 0.0 |
| DEX0477_032.nt.1 | 11307.02 | 23.5 | 23.5 | 30.8 | 30.8 | 0.0 | 0.0 |
| DEX0477_032.nt.1 | 21709.01 | 5.9 | 7.7 | 7.7 | 10.0 | 0.0 | 0.0 |
| DEX0477_032.nt.1 | 21709.02 | 17.6 | 21.4 | 23.1 | 25.0 | 0.0 | 0.0 |
| DEX0477_032.nt.1 | 21779.01 | 23.5 | 23.5 | 30.8 | 30.8 | 0.0 | 0.0 |
| DEX0477_032.nt.1 | 21779.02 | 23.5 | 25.0 | 30.8 | 33.3 | 0.0 | 0.0 |
| DEX0477_032.nt.1 | 22353.01 | 5.9 | 11.1 | 7.7 | 11.1 | 0.0 | 0.0 |
| DEX0477_032.nt.1 | 22353.02 | 11.8 | 22.2 | 15.4 | 22.2 | 0.0 | 0.0 |
| DEX0477_033.nt.1 | 19534.01 | 11.8 | 33.3 | 0.0 | 0.0 | 50.0 | 66.7 |
| DEX0477_033.nt.1 | 19534.02 | 5.9 | 14.3 | 0.0 | 0.0 | 25.0 | 100.0 |
| DEX0477_033.nt.1 | 21523.01 | 5.9 | 7.7 | 0.0 | 0.0 | 25.0 | 33.3 |
| DEX0477_033.nt.1 | 21523.02 | 5.9 | 8.3 | 0.0 | 0.0 | 25.0 | 33.3 |
| DEX0477_033.nt.1 | 24504.01 | 11.8 | 33.3 | 0.0 | 0.0 | 50.0 | 100.0 |
| DEX0477_033.nt.1 | 24504.02 | 17.6 | 37.5 | 0.0 | 0.0 | 75.0 | 100.0 |
| DEX0477_033.nt.2 | 19534.01 | 11.8 | 33.3 | 0.0 | 0.0 | 50.0 | 66.7 |
| DEX0477_033.nt.2 | 19534.02 | 5.9 | 14.3 | 0.0 | 0.0 | 25.0 | 100.0 |
| DEX0477_033.nt.2 | 21523.01 | 5.9 | 7.7 | 0.0 | 0.0 | 25.0 | 33.3 |
| DEX0477_033.nt.2 | 21523.02 | 5.9 | 8.3 | 0.0 | 0.0 | 25.0 | 33.3 |
| DEX0477_033.nt.2 | 24504.01 | 11.8 | 33.3 | 0.0 | 0.0 | 50.0 | 100.0 |
| DEX0477_033.nt.2 | 24504.02 | 17.6 | 37.5 | 0.0 | 0.0 | 75.0 | 100.0 |
| DEX0477_033.nt.3 | 19534.01 | 11.8 | 33.3 | 0.0 | 0.0 | 50.0 | 66.0 |
| DEX0477_033.nt.3 | 19534.02 | 5.9 | 14.3 | 0.0 | 0.0 | 25.0 | 100.0 |
| DEX0477_033.nt.3 | 21523.01 | 5.9 | 7.7 | 0.0 | 0.0 | 25.0 | 33.3 |
| DEX0477_033.nt.3 | 21523.02 | 5.9 | 8.3 | 0.0 | 0.0 | 25.0 | 33.3 |
| DEX0477_033.nt.3 | 24504.01 | 11.8 | 33.3 | 0.0 | 0.0 | 50.0 | 100.0 |
| DEX0477_033.nt.3 | 24504.02 | 17.6 | 37.5 | 0.0 | 0.0 | 75.0 | 100.0 |
| DEX0477_037.nt.1 | 17118.01 | 23.5 | 23.5 | 30.8 | 30.8 | 0.0 | 0.0 |
| DEX0477_037.nt.1 | 17118.02 | 23.5 | 23.5 | 30.8 | 30.8 | 0.0 | 0.0 |
| DEX0477_038.nt.1 | 18212.01 | 52.9 | 90.0 | 53.8 | 100.0 | 50.0 | 66.7 |
| DEX0477_038.nt.1 | 18212.02 | 47.1 | 100.0 | 46.2 | 100.0 | 50.0 | 100.0 |
| DEX0477_038.nt.2 | 18212.01 | 52.9 | 90.0 | 53.8 | 100.0 | 50.0 | 66.7 |
| DEX0477_038.nt.2 | 18212.02 | 47.1 | 100.0 | 46.2 | 100.0 | 50.0 | 100.0 |
| DEX0477_038.nt.3 | 18212.01 | 52.9 | 90.0 | 53.8 | 100.0 | 50.0 | 66.7 |
| DEX0477_038.nt.3 | 18212.02 | 47.1 | 100.0 | 46.2 | 100.0 | 50.0 | 100.0 |
| DEX0477_040.nt.1 | 19274.01 | 35.3 | 37.5 | 38.5 | 38.5 | 25.0 | 33.3 |
| DEX0477_040.nt.1 | 19274.02 | 23.5 | 25.0 | 30.8 | 30.8 | 0.0 | 0.0 |
| DEX0477_040.nt.2 | 19274.01 | 35.3 | 37.5 | 38.5 | 38.5 | 25.0 | 33.3 |
| DEX0477_040.nt.2 | 19274.02 | 23.5 | 25.0 | 30.8 | 30.8 | 0.0 | 0.0 |
| DEX0477_041.nt.1 | 11295.01 | 35.3 | 35.3 | 23.1 | 23.1 | 75.0 | 75.0 |
| DEX0477_041.nt.1 | 11295.02 | 29.4 | 29.4 | 15.4 | 15.4 | 75.0 | 75.0 |
| DEX0477_043.nt.1 | 18480.01 | 82.4 | 87.5 | 92.3 | 92.3 | 50.0 | 66.7 |
| DEX0477_043.nt.1 | 18480.02 | 88.2 | 88.2 | 92.3 | 92.3 | 75.0 | 75.0 |
| DEX0477_043.nt.1 | 18496.01 | 5.9 | 7.7 | 7.7 | 9.1 | 0.0 | 0.0 |
| DEX0477_043.nt.1 | 18496.02 | 5.9 | 7.7 | 7.7 | 9.1 | 0.0 | 0.0 |
| DEX0477_050.nt.1 | 18480.01 | 82.4 | 87.5 | 92.3 | 92.3 | 50.0 | 66.7 |
| DEX0477_050.nt.1 | 18480.02 | 88.2 | 88.2 | 92.3 | 92.3 | 75.0 | 75.0 |
| DEX0477_050.nt.1 | 18496.01 | 5.9 | 7.7 | 7.7 | 9.1 | 0.0 | 0.0 |
| DEX0477_050.nt.1 | 18496.02 | 5.9 | 7.7 | 7.7 | 9.1 | 0.0 | 0.0 |
| DEX0477_052.nt.1 | 10766.01 | 35.3 | 100.0 | 30.8 | 100.0 | 50.0 | 100.0 |
| DEX0477_052.nt.1 | 10766.02 | 41.2 | 100.0 | 30.8 | 100.0 | 75.0 | 100.0 |
| DEX0477_052.nt.1 | 21369.01 | 29.4 | 83.3 | 30.8 | 80.0 | 25.0 | 100.0 |
| DEX0477_052.nt.1 | 21369.02 | 23.5 | 80.0 | 23.1 | 75.0 | 25.0 | 100.0 |
| DEX0477_053.nt.1 | 18480.01 | 82.4 | 87.5 | 92.3 | 92.3 | 50.0 | 66.7 |
| DEX0477_053.nt.1 | 18480.02 | 88.2 | 88.2 | 92.3 | 92.3 | 75.0 | 75.0 |
| DEX0477_053.nt.1 | 18496.01 | 5.9 | 7.7 | 7.7 | 9.1 | 0.0 | 0.0 |
| DEX0477_053.nt.1 | 18496.02 | 5.9 | 7.7 | 7.7 | 9.1 | 0.0 | 0.0 |
| DEX0477_054.nt.1 | 9340.01 | 58.8 | 58.8 | 69.2 | 69.2 | 25.0 | 25.0 |
| DEX0477_054.nt.1 | 9340.02 | 76.5 | 76.5 | 76.9 | 76.9 | 75.0 | 75.0 |
| DEX0477_055.nt.1 | 20553.01 | 35.3 | 85.7 | 30.8 | 80.0 | 50.0 | 100.0 |
| DEX0477_055.nt.1 | 20553.02 | 29.4 | 100.0 | 30.8 | 100.0 | 25.0 | 100.0 |
| DEX0477_055.nt.1 | 20601.01 | 11.8 | 40.0 | 15.4 | 40.0 | 0.0 | 0.0 |
| DEX0477_055.nt.1 | 20601.02 | 5.9 | 33.3 | 7.7 | 33.3 | 0.0 | 0.0 |
| DEX0477_055.nt.2 | 20553.01 | 35.3 | 85.7 | 30.8 | 80.0 | 50.0 | 100.0 |
| DEX0477_055.nt.2 | 20553.02 | 29.4 | 100.0 | 30.8 | 100.0 | 25.0 | 100.0 |
| DEX0477_055.nt.2 | 20563.01 | 11.8 | 22.2 | 15.4 | 22.2 | 0.0 | 0.0 |
| DEX0477_055.nt.2 | 20563.02 | 17.6 | 27.3 | 23.1 | 30.0 | 0.0 | 0.0 |
| DEX0477_055.nt.2 | 20601.01 | 11.8 | 40.0 | 15.4 | 40.0 | 0.0 | 0.0 |
| DEX0477_055.nt.2 | 20601.02 | 5.9 | 33.3 | 7.7 | 33.3 | 0.0 | 0.0 |
| DEX0477_055.nt.3 | 20553.01 | 35.3 | 85.7 | 30.8 | 80.0 | 50.0 | 100.0 |
| DEX0477_055.nt.3 | 20553.02 | 29.4 | 100.0 | 30.8 | 100.0 | 25.0 | 100.0 |
| DEX0477_055.nt.3 | 20563.01 | 11.8 | 22.2 | 15.4 | 22.2 | 0.0 | 0.0 |
| DEX0477_055.nt.3 | 20563.02 | 17.6 | 27.3 | 23.1 | 30.0 | 0.0 | 0.0 |
| DEX0477_055.nt.3 | 20601.01 | 11.8 | 40.0 | 15.4 | 40.0 | 0.0 | 0.0 |
| DEX0477_055.nt.3 | 20601.02 | 5.9 | 33.3 | 7.7 | 33.3 | 0.0 | 0.0 |
| DEX0477_055.nt.4 | 20553.01 | 35.3 | 85.7 | 30.8 | 80.0 | 50.0 | 100.0 |
| DEX0477_055.nt.4 | 20553.02 | 29.4 | 100.0 | 30.8 | 100.0 | 25.0 | 100.0 |
| DEX0477_055.nt.4 | 20569.01 | 5.9 | 8.3 | 7.7 | 11.1 | 0.0 | 0.0 |
| DEX0477_055.nt.4 | 20569.02 | 0.0 | 0.0 | 0.0 | 0.0 | 0.0 | 0.0 |
| DEX0477_056.nt.1 | 19014.01 | 17.6 | 18.8 | 23.1 | 25.0 | 0.0 | 0.0 |
| DEX0477_056.nt.1 | 19014.02 | 23.5 | 23.5 | 30.8 | 30.8 | 0.0 | 0.0 |
| DEX0477_080.nt.1 | 19274.01 | 35.3 | 37.5 | 38.5 | 38.5 | 25.0 | 33.3 |
| DEX0477_080.nt.1 | 19274.02 | 23.5 | 25.0 | 30.8 | 30.8 | 0.0 | 0.0 |

[0596] TABLE 20

| | | Ovr | Ovr | Ovr | Ovr | | Ovr |
|---|---|---|---|---|---|---|---|
| | | Multi- | Multi- | Multi- | Multi- | Ovr | Multi- |
| | | Can ALL | Can ALL | Can INV | Can INV | Multi- | Can LMP |
| | Oligo | % up | % valid | % up | % valid | Can LMP | % valid |
| DEX ID | Name | n = 19 | up n = 19 | n = 14 | up n = 14 | % up n = 5 | up n = 5 |
| DEX0477_001.nt.1 | 78855.0 | 10.5 | 10.5 | 0.0 | 0.0 | 40.0 | 40.0 |
| DEX0477_001.nt.1 | 78855.1 | 5.3 | 5.3 | 0.0 | 0.0 | 20.0 | 20.0 |
| DEX0477_001.nt.1 | 78856.0 | 10.5 | 10.5 | 0.0 | 0.0 | 40.0 | 40.0 |
| DEX0477_001.nt.1 | 78856.1 | 10.5 | 10.5 | 0.0 | 0.0 | 40.0 | 40.0 |
| DEX0477_001.nt.2 | 78855.0 | 10.5 | 10.5 | 0.0 | 0.0 | 40.0 | 40.0 |
| DEX0477_001.nt.2 | 78855.1 | 5.3 | 5.3 | 0.0 | 0.0 | 20.0 | 20.0 |
| DEX0477_001.nt.2 | 78856.0 | 10.5 | 10.5 | 0.0 | 0.0 | 40.0 | 40.0 |
| DEX0477_001.nt.2 | 78856.1 | 10.5 | 10.5 | 0.0 | 0.0 | 40.0 | 40.0 |
| DEX0477_001.nt.4 | 78855.0 | 10.5 | 10.5 | 0.0 | 0.0 | 40.0 | 40.0 |
| DEX0477_001.nt.4 | 78855.1 | 5.3 | 5.3 | 0.0 | 0.0 | 20.0 | 20.0 |
| DEX0477_001.nt.4 | 78856.0 | 10.5 | 10.5 | 0.0 | 0.0 | 40.0 | 40.0 |
| DEX0477_001.nt.4 | 78856.1 | 10.5 | 10.5 | 0.0 | 0.0 | 40.0 | 40.0 |
| DEX0477_001.nt.5 | 78855.0 | 10.5 | 10.5 | 0.0 | 0.0 | 40.0 | 40.0 |
| DEX0477_001.nt.5 | 78855.1 | 5.3 | 5.3 | 0.0 | 0.0 | 20.0 | 20.0 |
| DEX0477_001.nt.5 | 78856.0 | 10.5 | 10.5 | 0.0 | 0.0 | 40.0 | 40.0 |
| DEX0477_001.nt.5 | 78856.1 | 10.5 | 10.5 | 0.0 | 0.0 | 40.0 | 40.0 |
| DEX0477_001.nt.6 | 78855.0 | 10.5 | 10.5 | 0.0 | 0.0 | 40.0 | 40.0 |
| DEX0477_001.nt.6 | 78855.1 | 5.3 | 5.3 | 0.0 | 0.0 | 20.0 | 20.0 |
| DEX0477_001.nt.6 | 78856.0 | 10.5 | 10.5 | 0.0 | 0.0 | 40.0 | 40.0 |
| DEX0477_001.nt.6 | 78856.1 | 10.5 | 10.5 | 0.0 | 0.0 | 40.0 | 40.0 |
| DEX0477_001.nt.7 | 78855.0 | 10.5 | 10.5 | 0.0 | 0.0 | 40.0 | 40.0 |
| DEX0477_001.nt.7 | 78855.1 | 5.3 | 5.3 | 0.0 | 0.0 | 20.0 | 20.0 |
| DEX0477_001.nt.7 | 78856.0 | 10.5 | 10.5 | 0.0 | 0.0 | 40.0 | 40.0 |
| DEX0477_001.nt.7 | 78856.1 | 10.5 | 10.5 | 0.0 | 0.0 | 40.0 | 40.0 |
| DEX0477_001.nt.8 | 78855.0 | 10.5 | 10.5 | 0.0 | 0.0 | 40.0 | 40.0 |
| DEX0477_001.nt.8 | 78855.1 | 5.3 | 5.3 | 0.0 | 0.0 | 20.0 | 20.0 |
| DEX0477_001.nt.8 | 78856.0 | 10.5 | 10.5 | 0.0 | 0.0 | 40.0 | 40.0 |
| DEX0477_001.nt.8 | 78856.1 | 10.5 | 10.5 | 0.0 | 0.0 | 40.0 | 40.0 |
| DEX0477_001.nt.9 | 78855.0 | 10.5 | 10.5 | 0.0 | 0.0 | 40.0 | 40.0 |
| DEX0477_001.nt.9 | 78855.1 | 5.3 | 5.3 | 0.0 | 0.0 | 20.0 | 20.0 |
| DEX0477_001.nt.9 | 78856.0 | 10.5 | 10.5 | 0.0 | 0.0 | 40.0 | 40.0 |
| DEX0477_001.nt.9 | 78856.1 | 10.5 | 10.5 | 0.0 | 0.0 | 40.0 | 40.0 |
| DEX0477_002.nt.1 | 78855.0 | 10.5 | 10.5 | 0.0 | 0.0 | 40.0 | 40.0 |
| DEX0477_002.nt.1 | 78855.1 | 5.3 | 5.3 | 0.0 | 0.0 | 20.0 | 20.0 |
| DEX0477_002.nt.1 | 78856.0 | 10.5 | 10.5 | 0.0 | 0.0 | 40.0 | 40.0 |
| DEX0477_002.nt.1 | 78856.1 | 10.5 | 10.5 | 0.0 | 0.0 | 40.0 | 40.0 |
| DEX0477_002.nt.2 | 78855.0 | 10.5 | 10.5 | 0.0 | 0.0 | 40.0 | 40.0 |
| DEX0477_002.nt.2 | 78855.1 | 5.3 | 5.3 | 0.0 | 0.0 | 20.0 | 20.0 |
| DEX0477_002.nt.2 | 78856.0 | 10.5 | 10.5 | 0.0 | 0.0 | 40.0 | 40.0 |
| DEX0477_002.nt.2 | 78856.1 | 10.5 | 10.5 | 0.0 | 0.0 | 40.0 | 40.0 |
| DEX0477_003.nt.1 | 96120.0 | [symbol] 3.2 | 63.2 | 71.4 | 71.4 | 40.0 | 40.0 |
| DEX0477_003.nt.1 | 96120.1 | 63.2 | 63.2 | 71.4 | 71.4 | 40.0 | 40.0 |
| DEX0477_003.nt.1 | 105624.0 | 63 [symbol] | 63.2 | 71.4 | 71.4 | 40.0 | 40.0 |
| DEX0477_003.nt.1 | 105624.1 | 52.6 | 62.5 | 64.3 | 75. [symbol] | 20.0 | 25.0 |
| DEX0477_003.nt.1 | 105627.0 | 68.4 | 68.4 | 78.6 | 78.6 | [symbol] 0.0 | 40.0 |
| DEX0477_003.nt.1 | 105627.1 | 57.9 | 61.1 | 71.4 | 71.4 | 20.0 | 25.0 |
| DEX0477_003.nt.1 | 105628.0 | 68.4 | 68.4 | 78.6 | 78.6 | [symbol] .0 | 40.0 |
| DEX0477_003.nt.1 | 105628.1 | 68.4 | 68.4 | 78.6 | 78.6 | [symbol] .0 | 40.0 |
| DEX0477_003.nt.2 | 96120.0 | 63.2 | 63.2 | 71.4 | 71.4 | 40.0 | 40. [symbol] |
| DEX0477_003.nt.2 | 96120.1 | 63.2 | 63.2 | 71.4 | 71.4 | 40.0 | 40.0 |
| DEX0477_003.nt.2 | 105624.0 | 63.2 | 63.2 | 71.4 | 71.4 | 40.0 | 40.0 |
| DEX0477_003.nt.2 | 105624.1 | 52.6 | 62.5 | 64.3 | 75.0 | 20.0 | 25.0 |
| DEX0477_003.nt.2 | 105627.0 | 68.4 | 68.4 | 78.6 | 78.6 | 40.0 | 40.0 |
| DEX0477_003.nt.2 | 105627.1 | 57.9 | 61.1 | 71.4 | 71.4 | 20.0 | 25.0 |
| DEX0477_003.nt.2 | 105628.0 | 68.4 | 68.4 | 78.6 | 78.6 | 40.0 | 40.0 |
| DEX0477_003.nt.2 | 105628.1 | 68.4 | 68.4 | 78.6 | 78.6 | 40.0 | 40.0 |
| DEX0477_004.nt.1 | 1200.0 | 26.3 | 33.3 | 28.6 | 36.4 | 20.0 | 25.0 |
| DEX0477_004.nt.1 | 1201.0 | 26.3 | 29.4 | 28.6 | 30.8 | 20.0 | 25.0 |
| DEX0477_006.nt.1 | 9744.0 | 42.1 | 42.1 | 50.0 | 50.0 | 20.0 | 20.0 |
| DEX0477_006.nt.1 | 9744.1 | 42.1 | 42.1 | 50.0 | 50.0 | 20.0 | 20.0 |
| DEX0477_006.nt.1 | 9745.0 | 52.6 | 55.6 | 64.3 | 64.3 | 20.0 | 25.0 |
| DEX0477_006.nt.1 | 9745.1 | 52.6 | 62.5 | 64.3 | 75.0 | 20.0 | 25.0 |
| DEX0477_007.nt.1 | 17852.0 | 42.1 | 61.5 | 28.6 | 44.4 | 80.0 | 100.0 |
| DEX0477_007.nt.1 | 17852.1 | 47.4 | 69.2 | 35.7 | 55.6 | 80.0 | 100.0 |
| DEX0477_007.nt.1 | 17853.0 | 21.1 | 44.4 | 14.3 | 28.6 | 40.0 | 100.0 |
| DEX0477_007.nt.1 | 17853.1 | 21.1 | 50.0 | 14.3 | 33.3 | 40.0 | 100.0 |
| DEX0477_007.nt.1 | 18644.0 | 42.1 | 61.5 | 28.6 | 44.4 | 80.0 | 100.0 |
| DEX0477_007.nt.1 | 18644.1 | 42.1 | 66.7 | 28.6 | 50.0 | 80.0 | 100.0 |
| DEX0477_007.nt.1 | 18644.2 | 31.6 | 60.0 | 21.4 | 42.9 | 60.0 | 100.0 |
| DEX0477_007.nt.1 | 18644.3 | 42.1 | 66.7 | 35.7 | 55.6 | 60.0 | 100.0 |
| DEX0477_007.nt.1 | 18645.0 | 31.6 | 60.0 | 21.4 | 42.9 | 60.0 | 100.0 |
| DEX0477_007.nt.1 | 18645.1 | 31.6 | 60.0 | 21.4 | 42.9 | 60.0 | 100.0 |
| DEX0477_007.nt.1 | 18645.2 | 31.6 | 66.7 | 21.4 | 50.0 | 60.0 | 100.0 |
| DEX0477_007.nt.1 | 18645.3 | 21.1 | 44.4 | 14.3 | 28.6 | 40.0 | 100.0 |
| DEX0477_008.nt.1 | 4733.0 | 68.4 | 72.2 | 64.3 | 69.2 | 80.0 | 80.0 |
| DEX0477_008.nt.1 | 4733.1 | 63.2 | 63.2 | 57.1 | 57.1 | 80.0 | 80.0 |
| DEX0477_008.nt.1 | 4734.0 | 63.2 | 63.2 | 57.1 | 57.1 | 80.0 | 80.0 |
| DEX0477_008.nt.1 | 4734.1 | 68.4 | 68.4 | 64.3 | 64.3 | 80.0 | 80.0 |
| DEX0477_009.nt.1 | 990.0 | 36.8 | 43.8 | 42.9 | 46.2 | 20.0 | 33.3 |
| DEX0477_011.nt.1 | 102558.0 | 15.8 | 15.8 | 21.4 | 21.4 | 0.0 | 0.0 |
| DEX0477_011.nt.1 | 102558.1 | 15.8 | 15.8 | 21.4 | 21.4 | 0.0 | 0.0 |
| DEX0477_013.nt.1 | 10548.0 | 26.3 | 27.8 | 28.6 | 30.8 | 20.0 | 20.0 |
| DEX0477_013.nt.1 | 10548.1 | 31.6 | 31.6 | 35.7 | 35.7 | 20.0 | 20.0 |
| DEX0477_013.nt.1 | 10549.0 | 31.6 | 31.6 | 35.7 | 35.7 | 20.0 | 20.0 |
| DEX0477_013.nt.1 | 10549.1 | 31.6 | 31.6 | 35.7 | 35.7 | 20.0 | 20.0 |
| DEX0477_014.nt.1 | 4538.0 | 31.6 | 75.0 | 28.6 | 66.7 | 40.0 | 100.0 |
| DEX0477_014.nt.1 | 4538.1 | 31.6 | 85.7 | 28.6 | 80.0 | 40.0 | 100.0 |
| DEX0477_014.nt.1 | 4539.0 | 0.0 | 0.0 | 0.0 | 0.0 | 0.0 | 0.0 |
| DEX0477_014.nt.1 | 4539.1 | 0.0 | 0.0 | 0.0 | 0.0 | 0.0 | 0.0 |
| DEX0477_014.nt.1 | 27949.0 | 31.6 | 75.0 | 28.6 | 66.7 | 40.0 | 100.0 |
| DEX0477_014.nt.1 | 27949.1 | 31.6 | 75.0 | 28.6 | 66.7 | 40.0 | 100.0 |
| DEX0477_014.nt.1 | 27950.0 | 5.3 | 5.3 | 7.1 | 7.1 | 0.0 | 0.0 |
| DEX0477_014.nt.1 | 27950.1 | 0.0 | 0.0 | 0.0 | 0.0 | 0.0 | 0.0 |
| DEX0477_014.nt.2 | 4538.0 | 31.6 | 75.0 | 28.6 | 66.7 | 40.0 | 100.0 |
| DEX0477_014.nt.2 | 4538.1 | 31.6 | 85.7 | 28.6 | 80.0 | 40.0 | 100.0 |
| DEX0477_014.nt.2 | 4539.0 | 0.0 | 0.0 | 0.0 | 0.0 | 0.0 | 0.0 |
| DEX0477_014.nt.2 | 4539.1 | 0.0 | 0.0 | 0.0 | 0.0 | 0.0 | 0.0 |
| DEX0477_014.nt.2 | 27949.0 | 31.6 | 75.0 | 28.6 | 66.7 | 40.0 | 100.0 |
| DEX0477_014.nt.2 | 27949.1 | 31.6 | 75.0 | 28.6 | 66.7 | 40.0 | 100.0 |
| DEX0477_014.nt.2 | 27950.0 | 5.3 | 5.3 | 7.1 | 7.1 | 0.0 | 0.0 |
| DEX0477_014.nt.2 | 27950.1 | 0.0 | 0.0 | 0.0 | 0.0 | 0.0 | 0.0 |
| DEX0477_014.nt.3 | 4538.0 | 31.6 | 75.0 | 28.6 | 66.7 | 40.0 | 100.0 |
| DEX0477_014.nt.3 | 4538.1 | 31.6 | 85.7 | 28.6 | 80.0 | 40.0 | 100.0 |
| DEX0477_014.nt.3 | 4539.0 | 0.0 | 0.0 | 0.0 | 0.0 | 0.0 | 0.0 |
| DEX0477_014.nt.3 | 4539.1 | 0.0 | 0.0 | 0.0 | 0.0 | 0.0 | 0.0 |
| DEX0477_014.nt.3 | 27949.0 | 31.6 | 75.0 | 28.6 | 66.7 | 40.0 | 100.0 |
| DEX0477_014.nt.3 | 27949.1 | 31.6 | 75.0 | 28.6 | 66.7 | 40.0 | 100.0 |
| DEX0477_014.nt.3 | 27950.0 | 5.3 | 5.3 | 7.1 | 7.1 | 0.0 | 0.0 |
| DEX0477_014.nt.3 | 27950.1 | 0.0 | 0.0 | 0.0 | 0.0 | 0.0 | 0.0 |
| DEX0477_015.nt.1 | 2085.0 | 42.1 | 42.1 | 28.6 | 28.6 | 80.0 | 80.0 |
| DEX0477_015.nt.1 | 4909.0 | 47.4 | 47.4 | 28.6 | 28.6 | 100.0 | 100.0 |
| DEX0477_015.nt.1 | 4909.1 | 47.4 | 47.4 | 28.6 | 28.6 | 100.0 | 100.0 |
| DEX0477_015.nt.1 | 4910.0 | 47.4 | 47.4 | 35.7 | 35.7 | 80.0 | 80.0 |
| DEX0477_015.nt.1 | 4910.1 | 52.6 | 52.6 | 35.7 | 35.7 | 100.0 | 100.0 |
| DEX0477_015.nt.1 | 17292.0 | 52.6 | 55.6 | 35.7 | 38.5 | 100.0 | 100.0 |
| DEX0477_015.nt.1 | 17292.1 | 52.6 | 55.6 | 35.7 | 38.5 | 100.0 | 100.0 |
| DEX0477_015.nt.1 | 17293.0 | 52.6 | 52.6 | 35.7 | 35.7 | 100.0 | 100.0 |
| DEX0477_015.nt.1 | 17293.1 | 52.6 | 52.6 | 35.7 | 35.7 | 100.0 | 100.0 |
| DEX0477_015.nt.1 | 24404.0 | 52.6 | 52.6 | 35.7 | 35.7 | 100.0 | 100.0 |
| DEX0477_015.nt.1 | 24404.1 | 52.6 | 52.6 | 35.7 | 35.7 | 100.0 | 100.0 |
| DEX0477_015.nt.1 | 24405.0 | 52.6 | 52.6 | 35.7 | 35.7 | 100.0 | 100.0 |
| DEX0477_015.nt.1 | 24405.1 | 52.6 | 52.6 | 35.7 | 35.7 | 100.0 | 100.0 |
| DEX0477_015.nt.2 | 2085.0 | 42.1 | 42.1 | 28.6 | 28.6 | 80.0 | 80.0 |
| DEX0477_015.nt.2 | 4909.0 | 47.4 | 47.4 | 28.6 | 28.6 | 100.0 | 100.0 |
| DEX0477_015.nt.2 | 4909.1 | 47.4 | 47.4 | 28.6 | 28.6 | 100.0 | 100.0 |
| DEX0477_015.nt.2 | 4910.0 | 47.4 | 47.4 | 35.7 | 35.7 | 80.0 | 80.0 |
| DEX0477_015.nt.2 | 4910.1 | 52.6 | 52.6 | 35.7 | 35.7 | 100.0 | 100.0 |
| DEX0477_015.nt.2 | 17292.0 | 52.6 | 55.6 | 35.7 | 38.5 | 100.0 | 100.0 |
| DEX0477_015.nt.2 | 17292.1 | 52.6 | 55.6 | 35.7 | 38.5 | 100.0 | 100.0 |
| DEX0477_015.nt.2 | 17293.0 | 52.6 | 52.6 | 35.7 | 35.7 | 100.0 | 100.0 |
| DEX0477_015.nt.2 | 17293.1 | 52.6 | 52.6 | 35.7 | 35.7 | 100.0 | 100.0 |
| DEX0477_015.nt.2 | 24404.0 | 52.6 | 52.6 | 35.7 | 35.7 | 100.0 | 100.0 |
| DEX0477_015.nt.2 | 24404.1 | 52.6 | 52.6 | 35.7 | 35.7 | 100.0 | 100.0 |
| DEX0477_015.nt.2 | 24405.0 | 52.6 | 52.6 | 35.7 | 35.7 | 100.0 | 100.0 |
| DEX0477_015.nt.2 | 24405.1 | 52.6 | 52.6 | 35.7 | 35.7 | 100.0 | 100.0 |
| DEX0477_016.nt.1 | 33428.0 | 73.7 | 73.7 | 78.6 | 78.6 | 60.0 | 60.0 |
| DEX0477_016.nt.1 | 33428.1 | 78.9 | 78.9 | 85.7 | 85.7 | 60.0 | 60.0 |
| DEX0477_016.nt.1 | 33429.0 | 52.6 | 71.4 | 64.3 | 69.2 | 20.0 | 100.0 |
| DEX0477_016.nt.1 | 33429.1 | 73.7 | 73.7 | 78.6 | 78.6 | 60.0 | 60.0 |
| DEX0477_016.nt.1 | 37143.0 | 73.7 | 73.7 | 78.6 | 78.6 | 60.0 | 60.0 |
| DEX0477_016.nt.1 | 37143.1 | 78.9 | 78.9 | 85.7 | 85.7 | 60.0 | 60.0 |
| DEX0477_016.nt.1 | 37143.2 | 73.7 | 73.7 | 78.6 | 78.6 | 60.0 | 60.0 |
| DEX0477_016.nt.1 | 37143.3 | 73.7 | 77.8 | 78.6 | 84.6 | 60.0 | 60.0 |
| DEX0477_016.nt.1 | 37143.4 | 78.9 | 78.9 | 85.7 | 85.7 | 60.0 | 60.0 |
| DEX0477_016.nt.1 | 39533.0 | 78.9 | 78.9 | 85.7 | 85.7 | 60.0 | 60.0 |
| DEX0477_016.nt.1 | 39533.1 | 78.9 | 78.9 | 85.7 | 85.7 | 60.0 | 60.0 |
| DEX0477_016.nt.1 | 39534.0 | 73.7 | 73.7 | 78.6 | 78.6 | 60.0 | 60.0 |
| DEX0477_016.nt.1 | 39534.1 | 73.7 | 77.8 | 78.6 | 84.6 | 60.0 | 60.0 |
| DEX0477_016.nt.2 | 33428.0 | 73.7 | 73.7 | 78.6 | 78.6 | 60.0 | 60.0 |
| DEX0477_016.nt.2 | 33428.1 | 78.9 | 78.9 | 85.7 | 85.7 | 60.0 | 60.0 |
| DEX0477_016.nt.2 | 33429.0 | 52.6 | 71.4 | 64.3 | 69.2 | 20.0 | 100.0 |
| DEX0477_016.nt.2 | 33429.1 | 73.7 | 73.7 | 78.6 | 78.6 | 60.0 | 60.0 |
| DEX0477_016.nt.2 | 37143.0 | 73.7 | 73.7 | 78.6 | 78.6 | 60.0 | 60.0 |
| DEX0477_016.nt.2 | 37143.1 | 78.9 | 78.9 | 85.7 | 85.7 | 60.0 | 60.0 |
| DEX0477_016.nt.2 | 37143.2 | 73.7 | 73.7 | 78.6 | 78.6 | 60.0 | 60.0 |
| DEX0477_016.nt.2 | 37143.3 | 73.7 | 77.8 | 78.6 | 84.6 | 60.0 | 60.0 |
| DEX0477_016.nt.2 | 37143.4 | 78.9 | 78.9 | 85.7 | 85.7 | 60.0 | 60.0 |
| DEX0477_016.nt.2 | 39533.0 | 78.9 | 78.9 | 85.7 | 85.7 | 60.0 | 60.0 |
| DEX0477_016.nt.2 | 39533.1 | 78.9 | 78.9 | 85.7 | 85.7 | 60.0 | 60.0 |
| DEX0477_016.nt.2 | 39534.0 | 73.7 | 73.7 | 78.6 | 78.6 | 60.0 | 60.0 |
| DEX0477_016.nt.2 | 39534.1 | 73.7 | 77.8 | 78.6 | 84.6 | 60.0 | 60.0 |
| DEX0477_016.nt.4 | 33428.0 | 73.7 | 73.7 | 78.6 | 78.6 | 60.0 | 60.0 |
| DEX0477_016.nt.4 | 33428.1 | 78.9 | 78.9 | 85.7 | 85.7 | 60.0 | 60.0 |
| DEX0477_016.nt.4 | 33429.0 | 52.6 | 71.4 | 64.3 | 69.2 | 20.0 | 100.0 |
| DEX0477_016.nt.4 | 33429.1 | 73.7 | 73.7 | 78.6 | 78.6 | 60.0 | 60.0 |
| DEX0477_016.nt.4 | 37143.0 | 73.7 | 73.7 | 78.6 | 78.6 | 60.0 | 60.0 |
| DEX0477_016.nt.4 | 37143.1 | 78.9 | 78.9 | 85.7 | 85.7 | 60.0 | 60.0 |
| DEX0477_016.nt.4 | 37143.2 | 73.7 | 73.7 | 78.6 | 78.6 | 60.0 | 60.0 |
| DEX0477_016.nt.4 | 37143.3 | 73.7 | 77.8 | 78.6 | 84.6 | 60.0 | 60.0 |
| DEX0477_016.nt.4 | 37143.4 | 78.9 | 78.9 | 85.7 | 85.7 | 60.0 | 60.0 |
| DEX0477_016.nt.4 | 39533.0 | 78.9 | 78.9 | 85.7 | 85.7 | 60.0 | 60.0 |
| DEX0477_016.nt.4 | 39533.1 | 78.9 | 78.9 | 85.7 | 85.7 | 60.0 | 60.0 |
| DEX0477_016.nt.4 | 39534.0 | 73.7 | 73.7 | 78.6 | 78.6 | 60.0 | 60.0 |
| DEX0477_016.nt.4 | 39534.1 | 73.7 | 77.8 | 78.6 | 84.6 | 60.0 | 60.0 |
| DEX0477_016.nt.5 | 33428.0 | 73.7 | 73.7 | 78.6 | 78.6 | 60.0 | 60.0 |
| DEX0477_016.nt.5 | 33428.1 | 78.9 | 78.9 | 85.7 | 85.7 | 60.0 | 60.0 |
| DEX0477_016.nt.5 | 33429.0 | 52.6 | 71.4 | 64.3 | 69.2 | 20.0 | 100.0 |
| DEX0477_016.nt.5 | 33429.1 | 73.7 | 73.7 | 78.6 | 78.6 | 60.0 | 60.0 |
| DEX0477_016.nt.5 | 37143.0 | 73.7 | 73.7 | 78.6 | 78.6 | 60.0 | 60.0 |
| DEX0477_016.nt.5 | 37143.1 | 78.9 | 78.9 | 85.7 | 85.7 | 60.0 | 60.0 |
| DEX0477_016.nt.5 | 37143.2 | 73.7 | 73.7 | 78.6 | 78.6 | 60.0 | 60.0 |
| DEX0477_016.nt.5 | 37143.3 | 73.7 | 77.8 | 78.6 | 84.6 | 60.0 | 60.0 |
| DEX0477_016.nt.5 | 37143.4 | 78.9 | 78.9 | 85.7 | 85.7 | 60.0 | 60.0 |
| DEX0477_016.nt.5 | 39533.0 | 78.9 | 78.9 | 85.7 | 85.7 | 60.0 | 60.0 |
| DEX0477_016.nt.5 | 39533.1 | 78.9 | 78.9 | 85.7 | 85.7 | 60.0 | 60.0 |
| DEX0477_016.nt.5 | 39534.0 | 73.7 | 73.7 | 78.6 | 78.6 | 60.0 | 60.0 |
| DEX0477_016.nt.5 | 39534.1 | 73.7 | 77.8 | 78.6 | 84.6 | 60.0 | 60.0 |
| DEX0477_018.nt.1 | 102557.0 | 15.8 | 15.8 | 21.4 | 21.4 | 0.0 | 0.0 |
| DEX0477_018.nt.1 | 102557.1 | 15.8 | 15.8 | 21.4 | 21.4 | 0.0 | 0.0 |
| DEX0477_018.nt.1 | 102558.0 | 15.8 | 15.8 | 21.4 | 21.4 | 0.0 | 0.0 |
| DEX0477_018.nt.1 | 102558.1 | 15.8 | 15.8 | 21.4 | 21.4 | 0.0 | 0.0 |
| DEX0477_019.nt.1 | 41937.0 | 31.6 | 66.7 | 21.4 | 50.0 | 60.0 | 100.0 |
| DEX0477_019.nt.1 | 41937.1 | 31.6 | 85.7 | 21.4 | 75.0 | 60.0 | 100.0 |
| DEX0477_019.nt.1 | 41937.2 | 31.6 | 85.7 | 21.4 | 75.0 | 60.0 | 100.0 |
| DEX0477_019.nt.1 | 41938.0 | 31.6 | 60.0 | 21.4 | 42.9 | 60.0 | 100.0 |
| DEX0477_019.nt.1 | 41938.1 | 31.6 | 46.2 | 21.4 | 33.3 | 60.0 | 75.0 |
| DEX0477_019.nt.1 | 41938.2 | 31.6 | 50.0 | 21.4 | 33.3 | 60.0 | 100.0 |
| DEX0477_019.nt.1 | 41939.0 | 31.6 | 42.9 | 21.4 | 27.3 | 60.0 | 100.0 |
| DEX0477_019.nt.1 | 41939.1 | 31.6 | 35.3 | 21.4 | 23.1 | 60.0 | 75.0 |
| DEX0477_019.nt.1 | 41939.2 | 31.6 | 35.3 | 21.4 | 23.1 | 60.0 | 75.0 |
| DEX0477_019.nt.1 | 41940.0 | 31.6 | 40.0 | 21.4 | 27.3 | 60.0 | 75.0 |
| DEX0477_019.nt.1 | 41940.1 | 31.6 | 40.0 | 21.4 | 27.3 | 60.0 | 75.0 |
| DEX0477_019.nt.1 | 41940.2 | 31.6 | 35.3 | 21.4 | 23.1 | 60.0 | 75.0 |
| DEX0477_019.nt.1 | 78627.0 | 26.3 | 62.5 | 14.3 | 40.0 | 60.0 | 100.0 |
| DEX0477_019.nt.1 | 78627.1 | 26.3 | 71.4 | 14.3 | 50.0 | 60.0 | 100.0 |
| DEX0477_019.nt.1 | 78628.0 | 31.6 | 85.7 | 21.4 | 75.0 | 60.0 | 100.0 |
| DEX0477_019.nt.1 | 78628.1 | 26.3 | 71.4 | 14.3 | 50.0 | 60.0 | 100.0 |
| DEX0477_019.nt.1 | 94127.0 | 26.3 | 35.7 | 14.3 | 20.0 | 60.0 | 75.0 |
| DEX0477_019.nt.1 | 94127.1 | 26.3 | 38.5 | 14.3 | 22.2 | 60.0 | 75.0 |
| DEX0477_019.nt.1 | 94128.0 | 26.3 | 71.4 | 21.4 | 60.0 | 40.0 | 100.0 |
| DEX0477_019.nt.1 | 94128.1 | 26.3 | 71.4 | 21.4 | 60.0 | 40.0 | 100.0 |
| DEX0477_019.nt.1 | 102785.0 | 26.3 | 45.5 | 14.3 | 25.0 | 60.0 | 100.0 |
| DEX0477_019.nt.1 | 102785.1 | 26.3 | 33.3 | 14.3 | 16.7 | 60.0 | 100.0 |
| DEX0477_019.nt.1 | 102786.0 | 26.3 | 71.4 | 21.4 | 60.0 | 40.0 | 100.0 |
| DEX0477_019.nt.1 | 102786.1 | 31.6 | 75.0 | 21.4 | 60.0 | 60.0 | 100.0 |
| DEX0477_019.nt.1 | 102787.0 | 31.6 | 50.0 | 21.4 | 33.3 | 60.0 | 100.0 |
| DEX0477_019.nt.1 | 102387.1 | 15.8 | 37.5 | 7.1 | 16.7 | 40.0 | 100.0 |
| DEX0477_019.nt.1 | 102789.0 | 26.3 | 83.3 | 21.4 | 75.0 | 40.0 | 100.0 |
| DEX0477_019.nt.1 | 102789.1 | 26.3 | 71.4 | 21.4 | 60.0 | 40.0 | [symbol] 00.0 |
| DEX0477_020.nt.1 | 41937.0 | 31.6 | 66.7 | 21.4 | 50.0 | 60.0 | 100.0 |
| DEX0477_020.nt.1 | 41937.1 | 31.6 | 85.7 | 21.4 | 75.0 | 60.0 | 100.0 |
| DEX0477_020.nt.1 | 41937.2 | 31.6 | 85.7 | 21.4 | 75.0 | 60.0 | 100.0 |
| DEX0477_020.nt.1 | 41938.0 | 31.6 | 60.0 | 21.4 | 42.9 | 60.0 | 100.0 |
| DEX0477_020.nt.1 | 41938.1 | 31.6 | 46.2 | 21.4 | 33.3 | 60.0 | 75.0 |
| DEX0477_020.nt.1 | 41938.2 | 31.6 | 50.0 | 21.4 | 33.3 | 60.0 | 100.0 |
| DEX0477_020.nt.1 | 41939.0 | 31.6 | 42.9 | 21.4 | 27.3 | 60.0 | 100.0 |
| DEX0477_020.nt.1 | 41939.1 | 31.6 | 35.3 | 21.4 | 23.1 | 60.0 | 75.0 |
| DEX0477_020.nt.1 | 41939.2 | 31.6 | 35.3 | 21.4 | 23.1 | 60.0 | 75.0 |
| DEX0477_020.nt.1 | 41940.0 | 31.6 | 40.0 | 21.4 | 27.3 | 60.0 | 75.0 |
| DEX0477_020.nt.1 | 41940.1 | 31.6 | 40.0 | 21.4 | 27.3 | 60.0 | 75.0 |
| DEX0477_020.nt.1 | 41940.2 | 31.6 | 35.3 | 21.4 | 23.1 | 60.0 | 75.0 |
| DEX0477_020.nt.1 | 78627.0 | 26.3 | 62.5 | 14.3 | 40.0 | 60.0 | 100.0 |
| DEX0477_020.nt.1 | 78627.1 | 26.3 | 71.4 | 14.3 | 50.0 | 60.0 | 100.0 |
| DEX0477_020.nt.1 | 78628.0 | 31.6 | 85.7 | 21.4 | 75.0 | 60.0 | 100.0 |
| DEX0477_020.nt.1 | 78628.1 | 26.3 | 71.4 | 14.3 | 50.0 | 60.0 | 100.0 |
| DEX0477_020.nt.1 | 94128.0 | 26.3 | 71.4 | 21.4 | 60.0 | 40.0 | 100.0 |
| DEX0477_020.nt.1 | 94128.1 | 26.3 | 71.4 | 21.4 | 60.0 | 40.0 | 100.0 |
| DEX0477_020.nt.1 | 102786.0 | 26.3 | 71.4 | 21.4 | 60.0 | 40.0 | 100.0 |
| DEX0477_020.nt.1 | 102786.1 | 31.6 | 75.0 | 21.4 | 60.0 | 60.0 | 100.0 |
| DEX0477_020.nt.1 | 102787.0 | 31.6 | 50.0 | 21.4 | 33.3 | 60.0 | 100.0 |
| DEX0477_020.nt.1 | 102787.1 | 15.8 | 37.5 | 7.1 | 16.7 | 40.0 | 100.0 |
| DEX0477_020.nt.1 | 102789.0 | 26.3 | 83.3 | 21.4 | 75.0 | 40.0 | 100.0 |
| DEX0477_020.nt.1 | 102789.1 | 26.3 | 71.4 | 21.4 | 60.0 | 40.0 | 100.0 |
| DEX0477_020.nt.2 | 41937.0 | 31.6 | 66.7 | 21.4 | 50.0 | 60.0 | 100.0 |
| DEX0477_020.nt.2 | 41937.1 | 31.6 | 85.7 | 21.4 | 75.0 | 60.0 | 100.0 |
| DEX0477_020.nt.2 | 41937.2 | 31.6 | 85.7 | 21.4 | 75.0 | 60.0 | 100.0 |
| DEX0477_020.nt.2 | 41938.0 | 31.6 | 60.0 | 21.4 | 42.9 | 60.0 | 100.0 |
| DEX0477_020.nt.2 | 41938.1 | 31.6 | 46.2 | 21.4 | 33.3 | 60.0 | 75.0 |
| DEX0477_020.nt.2 | 41938.2 | 31.6 | 50.0 | 21.4 | 33.3 | 60.0 | 100.0 |
| DEX0477_020.nt.2 | 41939.0 | 31.6 | 42.9 | 21.4 | 27.3 | 60.0 | 100.0 |
| DEX0477_020.nt.2 | 41939.1 | 31.6 | 35.3 | 21.4 | 23.1 | 60.0 | 75.0 |
| DEX0477_020.nt.2 | 41939.2 | 31.6 | 35.3 | 21.4 | 23.1 | 60.0 | 75.0 |
| DEX0477_020.nt.2 | 41940.0 | 31.6 | 40.0 | 21.4 | 27.3 | 60.0 | 75.0 |
| DEX0477_020.nt.2 | 41940.1 | 31.6 | 40.0 | 21.4 | 27.3 | 60.0 | 75.0 |
| DEX0477_020.nt.2 | 41940.2 | 31.6 | 35.3 | 21.4 | 23.1 | 60.0 | 75.0 |
| DEX0477_020.nt.2 | 78627.0 | 26.3 | 62.5 | 14.3 | 40.0 | 60.0 | 100.0 |
| DEX0477_020.nt.2 | 78627.1 | 26.3 | 71.4 | 14.3 | 50.0 | 60.0 | 100.0 |
| DEX0477_020.nt.2 | 78628.0 | 31.6 | 85.7 | 21.4 | 75.0 | 60.0 | 100.0 |
| DEX0477_020.nt.2 | 78628.1 | 26.3 | 71.4 | 14.3 | 50.0 | 60.0 | 100.0 |
| DEX0477_020.nt.2 | 94128.0 | 26.3 | 71.4 | 21.4 | 60.0 | 40.0 | 100.0 |
| DEX0477_020.nt.2 | 94128.1 | 26.3 | 71.4 | 21.4 | 60.0 | 40.0 | 100.0 |
| DEX0477_020.nt.2 | 102786.0 | 26.3 | 71.4 | 21.4 | 60.0 | 40.0 | 100.0 |
| DEX0477_020.nt.2 | 102786.1 | 31.6 | 75.0 | 21.4 | 60.0 | 60.0 | 100.0 |
| DEX0477_020.nt.2 | 102787.0 | 31.6 | 50.0 | 21.4 | 33.3 | 60.0 | 100.0 |
| DEX0477_020.nt.2 | 102787.1 | 15.8 | 37.5 | 7.1 | 16.7 | 40.0 | 100.0 |
| DEX0477_020.nt.2 | 102789.0 | 26.3 | 83.3 | 21.4 | 75.0 | 40.0 | 100.0 |
| DEX0477_020.nt.2 | 102789.1 | 26.3 | 71.4 | 21.4 | 60.0 | 40.0 | 100.0 |
| DEX0477_021.nt.1 | 26770.0 | 47.4 | 75.0 | 28.6 | 57.1 | 100.0 | 100.0 |
| DEX0477_021.nt.1 | 26770.1 | 47.4 | 75.0 | 28.6 | 57.1 | 100.0 | 100.0 |
| DEX0477_021.nt.1 | 26771.0 | 47.4 | 81.8 | 28.6 | 66.7 | 100.0 | 100.0 |
| DEX0477_021.nt.1 | 26771.1 | 47.4 | 75.0 | 28.6 | 57.1 | 100.0 | 100.0 |
| DEX0477_021.nt.1 | 33088.0 | 52.6 | 66.7 | 35.7 | 50.0 | 100.0 | 100.0 |
| DEX0477_021.nt.2 | 33088.1 | 47.4 | 64.3 | 35.7 | 50.0 | 80.0 | 100.0 |
| DEX0477_021.nt.1 | 33088.2 | 57.9 | 73.3 | 42.9 | 60. [symbol] | 100.0 | 10 [symbol] 0 |
| DEX0477_021.nt.1 | 33088.3 | 52.6 | 71.4 | 42.9 | 60.0 | 80.0 | 100.0 |
| DEX0477_021.nt.1 | 33089.0 | 52.6 | 76.9 | 35.7 | 62.5 | 100.0 | 100.0 |
| DEX0477_021.nt.1 | 33089.1 | 52.6 | 83.3 | 35.7 | 71.4 | 100.0 | 100.0 |
| DEX0477_021.nt.1 | 33089.2 | 21.1 | 57.1 | 14.3 | 40.0 | 40.0 | 100.0 |
| DEX0477_021.nt.1 | 33089.3 | 47.4 | 69.2 | 42.9 | 60.0 | 60.0 | 100.0 |
| DEX0477_021.nt.1 | 41945.0 | 42.1 | 66.7 | 28.6 | 50.0 | 80.0 | 100.0 |
| DEX0477_021.nt.1 | 41945.1 | 42.1 | 66.7 | 28.6 | 50.0 | 80.0 | 100.0 |
| DEX0477_021.nt.1 | 41945.2 | 47.4 | 75.0 | 28.6 | 57.1 | 100.0 | 100.0 |
| DEX0477_021.nt.1 | 41945.3 | 47.4 | 75.0 | 28.6 | 57.1 | 100.0 | 100.0 |
| DEX0477_021.nt.1 | 41945.4 | 47.4 | 75.0 | 28.6 | 57.1 | 100.0 | 100.0 |
| DEX0477_021.nt.1 | 41946.0 | 47.4 | 69.2 | 28.6 | 50.0 | 100.0 | 100.0 |
| DEX0477_021.nt.1 | 41946.1 | 42.1 | 80.0 | 28.6 | 66.7 | 80.0 | 100.0 |
| DEX0477_021.nt.1 | 41946.2 | 47.4 | 75.0 | 28.6 | 57.1 | 100.0 | 100.0 |
| DEX0477_021.nt.1 | 41946.3 | 47.4 | 69.2 | 28.6 | 50.0 | 100.0 | 100.0 |
| DEX0477_021.nt.1 | 41946.4 | 47.4 | 75.0 | 28.6 | 57.1 | 100.0 | 100.0 |
| DEX0477_021.nt.2 | 26770.0 | 47.4 | 75.0 | 28.6 | 57.1 | 100.0 | 100.0 |
| DEX0477_021.nt.2 | 26770.1 | 47.4 | 75.0 | 28.6 | 57.1 | 100.0 | 100.0 |
| DEX0477_021.nt.2 | 26771.0 | 47.4 | 81.8 | 28.6 | 66.7 | 100.0 | 100.0 |
| DEX0477_021.nt.2 | 26771.1 | 47.4 | 75.0 | 28.6 | 57.1 | 100.0 | 100.0 |
| DEX0477_021.nt.2 | 33088.0 | 52.6 | 66.7 | 35.7 | 50.0 | 100.0 | 100.0 |
| DEX0477_021.nt.2 | 33088.1 | 47.4 | 64.3 | 35.7 | 50.0 | 80.0 | 100.0 |
| DEX0477_021.nt.2 | 33088.2 | 57.9 | 73.3 | 42.9 | 60.0 | 100.0 | 100.0 |
| DEX0477_021.nt.2 | 33088.3 | 52.6 | 71.4 | 42.9 | 60.0 | 80.0 | 100.0 |
| DEX0477_021.nt.2 | 33089.0 | 52.6 | 76.9 | 35.7 | 62.5 | 100.0 | 100.0 |
| DEX0477_021.nt.2 | 33089.1 | 52.6 | 83.3 | 35.7 | 71.4 | 100.0 | 100.0 |
| DEX0477_021.nt.2 | 33089.2 | 21.1 | 57.1 | 14.3 | 40.0 | 40.0 | 100.0 |
| DEX0477_021.nt.2 | 33089.3 | 47.4 | 69.2 | 42.9 | 60.0 | 60.0 | 100.0 |
| DEX0477_021.nt.2 | 41945.0 | 42.1 | 66.7 | 28.6 | 50.0 | 80.0 | 100.0 |
| DEX0477_021.nt.2 | 41945.1 | 42.1 | 66.7 | 28.6 | 50.0 | 80.0 | 100.0 |
| DEX0477_021.nt.2 | 41945.2 | 47.4 | 75.0 | 28.6 | 57.1 | 100.0 | 100.0 |
| DEX0477_021.nt.2 | 41945.3 | 47.4 | 75.0 | 28.6 | 57.1 | 100.0 | 100.0 |
| DEX0477_021.nt.2 | 41945.4 | 47.4 | 75.0 | 28.6 | 57.1 | 100.0 | 100.0 |
| DEX0477_021.nt.2 | 41946.0 | 47.4 | 69.2 | 28.6 | 50.0 | 100.0 | 100.0 |
| DEX0477_021.nt.2 | 41946.1 | 42.1 | 80.0 | 28.6 | 66.7 | 80.0 | 100.0 |
| DEX0477_021.nt.2 | 41946.2 | 47.4 | 75.0 | 28.6 | 57.1 | 100.0 | 100.0 |
| DEX0477_021.nt.2 | 41946.3 | 47.4 | 69.2 | 28.6 | 50.0 | 100.0 | 100.0 |
| DEX0477_021.nt.2 | 41946.4 | 47.4 | 75.0 | 28.6 | 57.1 | 100.0 | 100.0 |
| DEX0477_022.nt.1 | 41937.0 | 31.6 | 66.7 | 21.4 | 50.0 | 60.0 | 100.0 |
| DEX0477_022.nt.1 | 41937.1 | 31.6 | 85.7 | 21.4 | 75.0 | 60.0 | 100.0 |
| DEX0477_022.nt.1 | 41937.2 | 31.6 | 85.7 | 21.4 | 75.0 | 60.0 | 100.0 |
| DEX0477_022.nt.1 | 41939.0 | 31.6 | 42.9 | 21.4 | 27.3 | 60.0 | 100.0 |
| DEX0477_022.nt.1 | 41939.1 | 31.6 | 35.3 | 21.4 | 23.1 | 60.0 | 75.0 |
| DEX0477_022.nt.1 | 41939.2 | 31.6 | 35.3 | 21.4 | 23.1 | 60.0 | 75.0 |
| DEX0477_022.nt.1 | 41940.0 | 31.6 | 40.0 | 21.4 | 27.3 | 60.0 | 75.0 |
| DEX0477_022.nt.1 | 41940.1 | 31.6 | 40.0 | 21.4 | 27.3 | 60.0 | 75.0 |
| DEX0477_022.nt.1 | 41940.2 | 31.6 | 35.3 | 21.4 | 23.1 | 60.0 | 75.0 |
| DEX0477_022.nt.1 | 78627.0 | 26.3 | 62.5 | 14.3 | 40.0 | 60.0 | 100.0 |
| DEX0477_022.nt.1 | 78627.1 | 26.3 | 71.4 | 14.3 | 50.0 | 60.0 | 100.0 |
| DEX0477_022.nt.1 | 78628.0 | 31.6 | 85.7 | 21.4 | 75.0 | 60.0 | 100.0 |
| DEX0477_022.nt.1 | 78628.1 | 26.3 | 71.4 | 14.3 | 50.0 | 60.0 | 100.0 |
| DEX0477_023.nt.1 | 33088.0 | 52.6 | 66.7 | 35.7 | 50.0 | 100.0 | 100.0 |
| DEX0477_023.nt.1 | 33088.1 | 47.4 | 64.3 | 33.7 | 50.0 | 80.0 | 100.0 |
| DEX0477_023.nt.1 | 33088.2 | 57.9 | [symbol] 3.3 | 42.9 | 60.0 | 100.0 | 100.0 |
| DEX0477_023.nt.1 | 33088.3 | 52.6 | 71.4 | 42.9 | 60.0 | 80.0 | 100.0 |
| DEX0477_024.nt.1 | 26770.0 | 47.4 | 75.0 | 28.6 | 57.1 | 100.0 | 100.0 |
| DEX0477_024.nt.1 | 26770.1 | 47.4 | 75.0 | 28.6 | 57.1 | 100.0 | 100.0 |
| DEX0477_024.nt.1 | 26771.0 | 47.4 | 81.8 | 28.6 | 66.7 | 100.0 | 100.0 |
| DEX0477_024.nt.1 | 26771.1 | 47.4 | 75.0 | 28.6 | 57.1 | 100.0 | 100.0 |
| DEX0477_024.nt.1 | 41945.0 | 42.1 | 66.7 | 28.6 | 50.0 | 80.0 | 100.0 |
| DEX0477_024.nt.1 | 41945.1 | 42.1 | 66.7 | 28.6 | 50.0 | 80.0 | 100.0 |
| DEX0477_024.nt.1 | 41945.2 | 47.4 | 75.0 | 28.6 | 57.1 | 100.0 | 100.0 |
| DEX0477_024.nt.1 | 41945.3 | 47.4 | 75.0 | 28.6 | 57.1 | 100.0 | 100.0 |
| DEX0477_024.nt.1 | 41945.4 | 47.4 | 75.0 | 28.6 | 57.1 | 100.0 | 100.0 |
| DEX0477_024.nt.1 | 41946.0 | 47.4 | 69.2 | 28.6 | 50.0 | 100.0 | 100.0 |
| DEX0477_024.nt.1 | 41946.1 | 42.1 | 80.0 | 28.6 | 66.7 | 80.0 | 100.0 |
| DEX0477_024.nt.1 | 41946.2 | 47.4 | 75.0 | 28.6 | 57.1 | 100.0 | 100.0 |
| DEX0477_024.nt.1 | 41946.3 | 47.4 | 69.2 | 28.6 | 50.0 | 100.0 | 100.0 |
| DEX0477_024.nt.1 | 41946.4 | 47.4 | 75.0 | 28.6 | 57.1 | 100.0 | 100.0 |
| DEX0477_024.nt.2 | 26770.0 | 47.4 | 75.0 | 28.6 | 57.1 | 100.0 | 100.0 |
| DEX0477_024.nt.2 | 26770.1 | 47.4 | 75.0 | 28.6 | 57.1 | 100.0 | 100.0 |
| DEX0477_024.nt.2 | 26771.0 | 47.4 | 81.8 | 28.6 | 66.7 | 100.0 | 100.0 |
| DEX0477_024.nt.2 | 26771.1 | 47.4 | 75.0 | 28.6 | 57.1 | 100.0 | 100.0 |
| DEX0477_024.nt.2 | 41945.0 | 42.1 | 66.7 | 28.6 | 50.0 | 80.0 | 100.0 |
| DEX0477_024.nt.2 | 41945.1 | 42.1 | 66.7 | 28.6 | 50.0 | 80.0 | 100.0 |
| DEX0477_024.nt.2 | 41945.2 | 47.4 | 75.0 | 28.6 | 57.1 | 100.0 | 100.0 |
| DEX0477_024.nt.2 | 41945.3 | 47.4 | 75.0 | 28.6 | 57.1 | 100.0 | 100.0 |
| DEX0477_024.nt.2 | 41945.4 | 47.4 | 75.0 | 28.6 | 57.1 | 100.0 | 100.0 |
| DEX0477_024.nt.2 | 41946.0 | 47.4 | 69.2 | 28.6 | 50.0 | 100.0 | 100.0 |
| DEX0477_024.nt.2 | 41946.1 | 42.1 | 80.0 | 28.6 | 66.7 | 80.0 | 100.0 |
| DEX0477_024.nt.2 | 41946.2 | 47.4 | 75.0 | 28.6 | 57.1 | 100.0 | 100.0 |
| DEX0477_024.nt.2 | 41946.3 | 47.4 | 69.2 | 28.6 | 50.0 | 100.0 | 100.0 |
| DEX0477_024.nt.2 | 41946.4 | 47.4 | 75.0 | 28.6 | 57.1 | 100.0 | 100.0 |
| DEX0477_024.nt.3 | 26770.0 | 47.4 | 75.0 | 28.6 | 57.1 | 100.0 | 100.0 |
| DEX0477_024.nt.3 | 26770.1 | 47.4 | 75.0 | 28.6 | 57.1 | 100.0 | 100.0 |
| DEX0477_024.nt.3 | 26771.0 | 47.4 | 81.8 | 28.6 | 66.7 | 100.0 | 100.0 |
| DEX0477_024.nt.3 | 26771.1 | 47.4 | 75.0 | 28.6 | 57.1 | 100.0 | 100.0 |
| DEX0477_024.nt.3 | 41945.0 | 42.1 | 66.7 | 28.6 | 50.0 | 80.0 | 100.0 |
| DEX0477_024.nt.3 | 41945.1 | 42.1 | 66.7 | 28.6 | 50.0 | 80.0 | 100.0 |
| DEX0477_024.nt.3 | 41945.2 | 47.4 | 75.0 | 28.6 | 57.1 | 100.0 | 100.0 |
| DEX0477_024.nt.3 | 41945.3 | 47.4 | 75.0 | 28.6 | 57.1 | 100.0 | 100.0 |
| DEX0477_024.nt.3 | 41945.4 | 47.4 | 75.0 | 28.6 | 57.1 | 100.0 | 100.0 |
| DEX0477_024.nt.3 | 41946.0 | 47.4 | 69.2 | 28.6 | 50.0 | 100.0 | 100.0 |
| DEX0477_024.nt.3 | 41946.1 | 42.1 | 80.0 | 28.6 | 66.7 | 80.0 | 100.0 |
| DEX0477_024.nt.3 | 41946.2 | 47.4 | 75.0 | 28.6 | 57.1 | 100.0 | 100.0 |
| DEX0477_024.nt.3 | 41946.3 | 47.4 | 69.2 | 28.6 | 50.0 | 100.0 | 100.0 |
| DEX0477_024.nt.3 | 41946.4 | 47.4 | 75.0 | 28.6 | 57.1 | 100.0 | 100.0 |
| DEX0477_024.nt.4 | 26770.0 | 47.4 | 75.0 | 28.6 | 57.1 | 100.0 | 100.0 |
| DEX0477_024.nt.4 | 26770.1 | 47.4 | 75.0 | 28.6 | 57.1 | 100.0 | 100.0 |
| DEX0477_024.nt.4 | 41945.0 | 42.1 | 66.7 | 28.6 | 50.0 | 80.0 | 100.0 |
| DEX0477_024.nt.4 | 41945.1 | 42.1 | 66.7 | 28.6 | 50.0 | 80.0 | 100.0 |
| DEX0477_024.nt.4 | 41945.2 | 47.4 | 75.0 | 28.6 | 57.1 | 100.0 | 100.0 |
| DEX0477_024.nt.4 | 41945.3 | 47.4 | 75.0 | 28.6 | 57.1 | 100.0 | 100.0 |
| DEX0477_024.nt.4 | 41945.4 | 47.4 | 75.0 | 28.6 | 57.1 | 100.0 | 100.0 |
| DEX0477_024.nt.4 | 41946.0 | 47.4 | 69.2 | 28.6 | 50.0 | 100.0 | 100.0 |
| DEX0477_024.nt.4 | 41946.1 | 42.1 | 80.0 | 28.6 | 66.7 | 80.0 | 100.0 |
| DEX0477_024.nt.4 | 41946.2 | 47.4 | 75.0 | 28.6 | 57.1 | 100.0 | 100.0 |
| DEX0477_024.nt.4 | 41946.3 | 47.4 | 69.2 | 28.6 | 50.0 | 100.0 | 100.0 |
| DEX0477_024.nt.4 | 41946.4 | 47.4 | 75.0 | 28.6 | 57.1 | 100.0 | 100.0 |
| DEX0477_027.nt.1 | 2441.0 | 31.6 | 31.6 | 42.9 | 42.9 | 0.0 | 0.0 |
| DEX0477_027.nt.1 | 5236.0 | 31.6 | 31.6 | 42.9 | 42.9 | 0.0 | 0.0 |
| DEX0477_027.nt.2 | 2441.0 | 31.6 | 31.6 | 42.9 | 42.9 | 0.0 | 0.0 |
| DEX0477_027.nt.2 | 5236.0 | 31.6 | 31.6 | 42.9 | 42.9 | 0.0 | 0.0 |
| DEX0477_027.nt.3 | 2441.0 | 31.6 | 31.6 | 42.9 | 42.9 | 0.0 | 0.0 |
| DEX0477_027.nt.3 | 5236.0 | 31.6 | 31.6 | 42.9 | 42.9 | 0.0 | 0.0 |
| DEX0477_027.nt.4 | 2441.0 | 31.6 | 31.6 | 42.9 | 42.9 | 0.0 | 0.0 |
| DEX0477_027.nt.4 | 5236.0 | 31.6 | 31.6 | 42.9 | 42.9 | 0.0 | 0.0 |
| DEX0477_027.nt.5 | 2441.0 | 31.6 | 31.6 | 42.9 | 42.9 | 0.0 | 0.0 |
| DEX0477_027.nt.5 | 5236.0 | 31.6 | 31.6 | 42.9 | 42.9 | 0.0 | 0.0 |
| DEX0477_027.nt.6 | 2441.0 | 31.6 | 31.6 | 42.9 | 42.9 | 0.0 | 0.0 |
| DEX0477_027.nt.6 | 5236.0 | 31.6 | 31.6 | 42.9 | 42.9 | 0.0 | 0.0 |
| DEX0477_027.nt.7 | 2441.0 | 31.6 | 31.6 | 42.9 | 42.9 | 0.0 | 0.0 |
| DEX0477_027.nt.7 | 5236.0 | 31.6 | 31.6 | 42.9 | 42.9 | 0.0 | 0.0 |
| DEX0477_030.nt.1 | 28117.0 | 73.7 | 82.4 | 78.6 | 84.6 | 60.0 | 75.0 |
| DEX0477_030.nt.1 | 28117.1 | 78.9 | 88.2 | 78.6 | 91.7 | 80.0 | 80.0 |
| DEX0477_030.nt.1 | 28118.0 | 63.2 | 75.0 | 71.4 | 83.3 | 40.0 | 50.0 |
| DEX0477_030.nt.1 | 28118.1 | 57.9 | 78.6 | 71.4 | 90.9 | 20.0 | 33.3 |
| DEX0477_030.nt.2 | 28117.0 | 73.7 | 82.4 | 78.6 | 84.6 | 60.0 | 75.0 |
| DEX0477_030.nt.2 | 28117.1 | 78.9 | 88.2 | 78.6 | 91.7 | 80.0 | 80.0 |
| DEX0477_030.nt.2 | 28118.0 | 63.2 | 75.0 | 71.4 | 83.3 | 40.0 | 50.0 |
| DEX0477_030.nt.2 | 28118.1 | 57.9 | 78.6 | 71.4 | 90.9 | 20.0 | 33.3 |
| DEX0477_030.nt.3 | 28117.0 | 73.7 | 82.4 | 78.6 | 84.6 | 60.0 | 75.0 |
| DEX0477_030.nt.3 | 28117.1 | 78.9 | 88.2 | 78.6 | 91.7 | 80.0 | 80.0 |
| DEX0477_030.nt.3 | 28118.0 | 63.2 | 75.0 | 71.4 | 83.3 | 40.0 | 50.0 |
| DEX0477_030.nt.3 | 28118.1 | 57.9 | 78.6 | 71.4 | 90.9 | 20.0 | 33.3 |
| DEX0477_033.nt.1 | 19534.0 | 21.1 | 23.5 | 7.1 | 7.7 | 60.0 | 75.0 |
| DEX0477_033.nt.1 | 19534.1 | 15.8 | 18.8 | 7.1 | 8.3 | 40.0 | 50.0 |
| DEX0477_033.nt.1 | 19535.0 | 21.1 | 40.0 | 7.1 | 14.3 | 60.0 | 100.0 |
| DEX0477_033.nt.1 | 19535.1 | 26.3 | 50.0 | 14.3 | 33.3 | 60.0 | 75.0 |
| DEX0477_033.nt.1 | 41957.0 | 15.8 | 21.4 | 0.0 | 0.0 | 60.0 | 100.0 |
| DEX0477_033.nt.1 | 41957.1 | 15.8 | 16.7 | 7.1 | 7.1 | 40.0 | 50.0 |
| DEX0477_033.nt.1 | 41957.2 | 21.1 | 23.5 | 7.1 | 7.7 | 60.0 | 75.0 |
| DEX0477_033.nt.1 | 41958.0 | 15.8 | 17.6 | 7.1 | 7.1 | 40.0 | 66.7 |
| DEX0477_033.nt.1 | 41958.1 | 21.1 | 25.0 | 7.1 | 8.3 | 60.0 | 75.0 |
| DEX0477_033.nt.1 | 41958.2 | 21.1 | 23.5 | 7.1 | 7.7 | 60.0 | 75.0 |
| DEX0477_033.nt.2 | 19534.0 | 21.1 | 23.5 | 7.1 | 7.7 | 60.0 | 75.0 |
| DEX0477_033.nt.2 | 19534.1 | 15.8 | 18.8 | 7.1 | 8.3 | 40.0 | 50.0 |
| DEX0477_033.nt.2 | 19535.0 | 21.1 | 40.0 | 7.1 | 14.3 | 60.0 | 100.0 |
| DEX0477_033.nt.2 | 19535.1 | 26.3 | 50.0 | 14.3 | 33.3 | 60.0 | 75.0 |
| DEX0477_033.nt.2 | 41957.0 | 15.8 | 21.4 | 0.0 | 0.0 | 60.0 | 100.0 |
| DEX0477_033.nt.2 | 41957.1 | 15.8 | 16.7 | 7.1 | 7.1 | 40.0 | 50.0 |
| DEX0477_033.nt.2 | 41957.2 | 21.1 | 23.5 | 7.1 | 7.7 | 60.0 | 75.0 |
| DEX0477_033.nt.2 | 41958.0 | 15.8 | 17.6 | 7.1 | 7.1 | 40.0 | 66.7 |
| DEX0477_033.nt.2 | 41958.1 | 21.1 | 25.0 | 7.1 | 8.3 | 60.0 | 75.0 |
| DEX0477_033.nt.2 | 41958.2 | 21.1 | 23.5 | 7.1 | 7.7 | 60.0 | 75.0 |
| DEX0477_033.nt.3 | 19534.0 | 21.1 | 23.5 | 7.1 | 7.7 | 60.0 | 75.0 |
| DEX0477_033.nt.3 | 19534.1 | 15.8 | 18.8 | 7.1 | 8.3 | 40.0 | 50.0 |
| DEX0477_033.nt.3 | 19535.0 | 21.1 | 40.0 | 7.1 | 14.3 | 60.0 | 100.0 |
| DEX0477_033.nt.3 | 19535.1 | 26.3 | 50.0 | 14.3 | 33.3 | 60.0 | 75.0 |
| DEX0477_033.nt.3 | 41957.0 | 15.8 | 21.4 | 0.0 | 0.0 | 60.0 | 100.0 |
| DEX0477_033.nt.3 | 41957.1 | 15.8 | 16.7 | 7.1 | 7.1 | 40.0 | 50.0 |
| DEX0477_033.nt.3 | 41957.2 | 21.1 | 23.5 | 7.1 | 7.7 | 60.0 | 75.0 |
| DEX0477_033.nt.3 | 41958.0 | 15.8 | 17.6 | 7.1 | 7.1 | 40.0 | 66.7 |
| DEX0477_033.nt.3 | 41958.1 | 21.1 | 25.0 | 7.1 | 8.3 | 60.0 | 75.0 |
| DEX0477_033.nt.3 | 41958.2 | 21.1 | 23.5 | 7.1 | 7.7 | 60.0 | 75.0 |
| DEX0477_035.nt.1 | 996.0 | 42.1 | 42.1 | 50.0 | 50.0 | 20.0 | 20.0 |
| DEX0477_035.nt.4 | 996.0 | 42.1 | 42.1 | 50.0 | 50.0 | 20.0 | 20.0 |
| DEX0477_035.nt.5 | 996.0 | 42.1 | 42.1 | 50.0 | 50.0 | 20.0 | 20.0 |
| DEX0477_036.nt.1 | 2371.0 | 36.8 | 50.0 | 42.9 | 54.5 | 20.0 | 33.3 |
| DEX0477_036.nt.1 | 2406.0 | 47.4 | 50.0 | 50.0 | 53.8 | 40.0 | 40.0 |
| DEX0477_036.nt.1 | 2442.0 | 36.8 | 46.7 | 42.9 | 50.0 | 20.0 | 33.3 |
| DEX0477_036.nt.1 | 3111.0 | 57.9 | 84.6 | 57.1 | 80.0 | 60.0 | 100.0 |
| DEX0477_042.nt.1 | 3383.0 | 78.9 | 78.9 | 92.9 | 92.9 | 40.0 | 40.0 |
| DEX0477_044.nt.1 | 36481.0 | 63.2 | 75.0 | 50.0 | 63.6 | 100.0 | 100.0 |
| DEX0477_044.nt.1 | 36481.1 | 63.2 | 75.0 | 50.0 | 63.6 | 100.0 | 100.0 |
| DEX0477_044.nt.1 | 36482.0 | 31.6 | 42.9 | 28.6 | 40.0 | 40.0 | 50.0 |
| DEX0477_044.nt.1 | 36482.1 | 31.6 | 50.0 | 28.6 | 44.4 | 40.0 | 66.7 |
| DEX0477_044.nt.2 | 36481.0 | 63.2 | 75.0 | 50.0 | 63.6 | 100.0 | 100.0 |
| DEX0477_044.nt.2 | 36481.1 | 63.2 | 75.0 | 50.0 | 63.6 | 100.0 | 100.0 |
| DEX0477_044.nt.2 | 36482.0 | 31.6 | 42.9 | 28.6 | 40.0 | 40.0 | 50.0 |
| DEX0477_044.nt.2 | 36482.1 | 31.6 | 50.0 | 28.6 | 44.4 | 40.0 | 66.7 |
| DEX0477_044.nt.3 | 36481.0 | 63.2 | 75.0 | 50.0 | 63.6 | 100.0 | 100.0 |
| DEX0477_044.nt.3 | 36481.1 | 63.2 | 75.0 | 50.0 | 63.6 | 100.0 | 100.0 |
| DEX0477_044.nt.3 | 36482.0 | 31.6 | 42.9 | 28.6 | 40.0 | 40.0 | 50.0 |
| DEX0477_044.nt.3 | 36482.1 | 31.6 | 50.0 | 28.6 | 44.4 | 40.0 | 66.7 |
| DEX0477_046.nt.1 | 1551.0 | 47.4 | 50.0 | 50.0 | 53.8 | 40.0 | 40.0 |
| DEX0477_047.nt.1 | 452.0 | 26.3 | 50.0 | 35.7 | 55.6 | 0.0 | 0.0 |
| DEX0477_048.nt.1 | 33514.0 | 31.6 | 60.0 | 28.6 | 57.1 | 40.0 | 66.7 |
| DEX0477_048.nt.1 | 33514.1 | 26.3 | 71.4 | 21.4 | 60.0 | 40.0 | 100.0 |
| DEX0477_048.nt.1 | 33515.0 | 36.8 | 46.7 | 35.7 | 45.5 | 40.0 | 50.0 |
| DEX0477_048.nt.1 | 33515.1 | 52.6 | 66.7 | 50.0 | 63.6 | 60.0 | 75.0 |
| DEX0477_048.nt.2 | 33514.0 | 31.6 | 60.0 | 28.6 | 57.1 | 40.0 | 66.7 |
| DEX0477_048.nt.2 | 33514.1 | 26.3 | 71.4 | 21.4 | 60.0 | 40.0 | 100.0 |
| DEX0477_048.nt.2 | 33515.0 | 36.8 | 46.7 | 35.7 | 45.5 | 40.0 | 50.0 |
| DEX0477_048.nt.2 | 33515.1 | 52.6 | 66.7 | 50.0 | 63.6 | 60.0 | 75.0 |
| DEX0477_048.nt.3 | 33514.0 | 31.6 | 60.0 | 28.6 | 57.1 | 40.0 | 66.7 |
| DEX0477_048.nt.3 | 33514.1 | 26.3 | 71.4 | 21.4 | 60.0 | 40.0 | 100.0 |
| DEX0477_048.nt.3 | 33515.0 | 36.8 | 46.7 | 35.7 | 45.5 | 40.0 | 50.0 |
| DEX0477_048.nt.3 | 33515.1 | 52.6 | 66.7 | 50.0 | 63.6 | 60.0 | 75.0 |
| DEX0477_048.nt.4 | 33514.0 | 31.6 | 60.0 | 28.6 | 57.1 | 40.0 | 66.7 |
| DEX0477_048.nt.4 | 33514.1 | 26.3 | 71.4 | 21.4 | 60.0 | 40.0 | 100.0 |
| DEX0477_048.nt.4 | 33515.0 | 36.8 | 46.7 | 35.7 | 45.5 | 40.0 | 50.0 |
| DEX0477_048.nt.4 | 33515.1 | 52.6 | 66.7 | 50.0 | 63.6 | 60.0 | 75.0 |
| DEX0477_051.nt.1 | 3081.0 | 52.6 | 52.6 | 50.0 | 50.0 | 60.0 | 60.0 |
| DEX0477_052.nt.1 | 10766.0 | 52.6 | 100.0 | 42.9 | 100.0 | 80.0 | 100.0 |
| DEX0477_052.nt.1 | 10766.1 | 52.6 | 100.0 | 42.9 | 100.0 | 80.0 | 100.0 |
| DEX0477_052.nt.1 | 10767.0 | 68.4 | 92.9 | 64.3 | 90.0 | 80.0 | 100.0 |
| DEX0477_052.nt.1 | 10767.1 | 68.4 | 92.9 | 71.4 | 90.9 | 60.0 | 100.0 |
| DEX0477_054.nt.1 | 9340.0 | 21.1 | 26.7 | 28.6 | 40.0 | 0.0 | 0.0 |
| DEX0477_054.nt.1 | 9340.1 | 31.6 | 40.0 | 35.7 | 50.0 | 20.0 | 20.0 |
| DEX0477_054.nt.2 | 9341.0 | 26.3 | 26.3 | 35.7 | 35.7 | 0.0 | 0.0 |
| DEX0477_054.nt.2 | 9341.1 | 26.3 | 26.3 | 35.7 | 35.7 | 0.0 | 0.0 |
| DEX0477_070.nt.1 | 3745.0 | 36.8 | 38.9 | 42.9 | 46.2 | 20.0 | 20.0 |

[0597] TABLE 21

| | | | Ovr | | Ovr | | Ovr |
|---|---|---|---|---|---|---|---|
| | | Ovr | Multi- | Ovr | Multi- | Ovr | Multi- |
| | | Multi- | Can 550 | Multi- | Can 550 | Multi- | Can 550 |
| | | Can 550 | ALL | Can 550 | INV | Can 550 | LMP |
| | Oligo | ALL % up | % valid | INV % up | % valid | LMP % up | % valid |
| DEX ID | Name | n = 19 | up n = 19 | n = 14 | up n = 14 | n = 5 | up n = 5 |
| DEX0477_001.nt.1 | 78855.0 | 15.8 | 15.8 | 7.1 | 7.1 | 40.0 | 40.0 |
| DEX0477_001.nt.1 | 78855.1 | 15.8 | 15.8 | 7.1 | 7.1 | 40.0 | 40.0 |
| DEX0477_001.nt.1 | 78856.0 | 15.8 | 15.8 | 7.1 | 7.1 | 40.0 | 40.0 |
| DEX0477_001.nt.1 | 78856.1 | 15.8 | 15.8 | 7.1 | 7.1 | 40.0 | 40.0 |
| DEX0477_001.nt.2 | 78855.0 | 15.8 | 15.8 | 7.1 | 7.1 | 40.0 | 40.0 |
| DEX0477_001.nt.2 | 78855.1 | 15.8 | 15.8 | 7.1 | 7.1 | 40.0 | 40.0 |
| DEX0477_001.nt.2 | 78856.0 | 15.8 | 15.8 | 7.1 | 7.1 | 40.0 | 40.0 |
| DEX0477_001.nt.2 | 78856.1 | 15.8 | 15.8 | 7.1 | 7.1 | 40.0 | 40.0 |
| DEX0477_001.nt.4 | 78855.0 | 15.8 | 15.8 | 7.1 | 7.1 | 40.0 | 40.0 |
| DEX0477_001.nt.4 | 78855.1 | 15.8 | 15.8 | 7.1 | 7.1 | 40.0 | 40.0 |
| DEX0477_001.nt.4 | 78856.0 | 15.8 | 15.8 | 7.1 | 7.1 | 40.0 | 40.0 |
| DEX0477_001.nt.4 | 78856.1 | 15.8 | 15.8 | 7.1 | 7.1 | 40.0 | 40.0 |
| DEX0477_001.nt.5 | 78855.0 | 15.8 | 15.8 | 7.1 | 7.1 | 40.0 | 40.0 |
| DEX0477_001.nt.5 | 78855.1 | 15.8 | 15.8 | 7.1 | 7.1 | 40.0 | 40.0 |
| DEX0477_001.nt.5 | 78856.0 | 15.8 | 15.8 | 7.1 | 7.1 | 40.0 | 40.0 |
| DEX0477_001.nt.5 | 78856.1 | 15.8 | 15.8 | 7.1 | 7.1 | 40.0 | 40.0 |
| DEX0477_001.nt.6 | 78855.0 | 15.8 | 15.8 | 7.1 | 7.1 | 40.0 | 40.0 |
| DEX0477_001.nt.6 | 78855.1 | 15.8 | 15.8 | 7.1 | 7.1 | 40.0 | 40.0 |
| DEX0477_001.nt.6 | 78856.0 | 15.8 | 15.8 | 7.1 | 7.1 | 40.0 | 40.0 |
| DEX0477_001.nt.6 | 78856.1 | 15.8 | 15.8 | 7.1 | 7.1 | 40.0 | 40.0 |
| DEX0477_001.nt.7 | 27921.0 | 0.0 | 0.0 | 0.0 | 0.0 | 0.0 | 0.0 |
| DEX0477_001.nt.7 | 27921.1 | 0.0 | 0.0 | 0.0 | 0.0 | 0.0 | 0.0 |
| DEX0477_001.nt.7 | 78855.0 | 15.8 | 15.8 | 7.1 | 7.1 | 40.0 | 40.0 |
| DEX0477_001.nt.7 | 78855.1 | 15.8 | 15.8 | 7.1 | 7.1 | 40.0 | 40.0 |
| DEX0477_001.nt.7 | 78856.0 | 15.8 | 15.8 | 7.1 | 7.1 | 40.0 | 40.0 |
| DEX0477_001.nt.7 | 78856.1 | 15.8 | 15.8 | 7.1 | 7.1 | 40.0 | 40.0 |
| DEX0477_001.nt.8 | 78855.0 | 15.8 | 15.8 | 7.1 | 7.1 | 40.0 | 40.0 |
| DEX0477_001.nt.8 | 78855.1 | 15.8 | 15.8 | 7.1 | 7.1 | 40.0 | 40.0 |
| DEX0477_001.nt.8 | 78856.0 | 15.8 | 15.8 | 7.1 | 7.1 | 40.0 | 40.0 |
| DEX0477_001.nt.8 | 78856.1 | 15.8 | 15.8 | 7.1 | 7.1 | 40.0 | 40.0 |
| DEX0477_001.nt.9 | 78855.0 | 15.8 | 15.8 | 7.1 | 7.1 | 40.0 | 40.0 |
| DEX0477_001.nt.9 | 78855.1 | 15.8 | 15.8 | 7.1 | 7.1 | 40.0 | 40.0 |
| DEX0477_001.nt.9 | 78856.0 | 15.8 | 15.8 | 7.1 | 7.1 | 40.0 | 40.0 |
| DEX0477_001.nt.9 | 78856.1 | 15.8 | 15.8 | 7.1 | 7.1 | 40.0 | 40.0 |
| DEX0477_002.nt.1 | 27921.0 | 0.0 | 0.0 | 0.0 | 0.0 | 0.0 | 0.0 |
| DEX0477_002.nt.1 | 78855.0 | 15.8 | 15.8 | 7.1 | 7.1 | 40.0 | 40.0 |
| DEX0477_002.nt.1 | 78855.1 | 15.8 | 15.8 | 7.1 | 7.1 | 40.0 | 40.0 |
| DEX0477_002.nt.1 | 78856.0 | 15.8 | 15.8 | 7.1 | 7.1 | 40.0 | 40.0 |
| DEX0477_002.nt.1 | 78856.1 | 15.8 | 15.8 | 7.1 | 7.1 | 40.0 | 40.0 |
| DEX0477_002.nt.2 | 27921.0 | 0.0 | 0.0 | 0.0 | 0.0 | 0.0 | 0.0 |
| DEX0477_002.nt.2 | 27921.1 | 0.0 | 0.0 | 0.0 | 0.0 | 0.0 | 0.0 |
| DEX0477_002.nt.2 | 27922.0 | 0.0 | 0.0 | 0.0 | 0.0 | 0.0 | 0.0 |
| DEX0477_002.nt.2 | 27922.1 | 0.0 | 0.0 | 0.0 | 0.0 | 0.0 | 0.0 |
| DEX0477_002.nt.2 | 78855.0 | 15.8 | 15.8 | 7.1 | 7.1 | 40.0 | 40.0 |
| DEX0477_002.nt.2 | 78855.1 | 15.8 | 15.8 | 7.1 | 7.1 | 40.0 | 40.0 |
| DEX0477_002.nt.2 | 78856.0 | 15.8 | 15.8 | 7.1 | 7.1 | 40.0 | 40.0 |
| DEX0477_002.nt.2 | 78856.1 | 15.8 | 15.8 | 7.1 | 7.1 | 40.0 | 40.0 |
| DEX0477_003.nt.1 | 96120.0 | 68.4 | 72.2 | 78.6 | 78.6 | 40.0 | 50.0 |
| DEX0477_003.nt.1 | 96120.1 | 68.4 | 76.5 | 78.6 | 84.6 | 40.0 | 50.0 |
| DEX0477_003.nt.1 | 105624.0 | 63.2 | 66.7 | 71.4 | 71.4 | 40.0 | 50.0 |
| DEX0477_003.nt.1 | 105624.1 | 52.6 | 66.7 | 64.3 | 75.0 | 20.0 | 33.3 |
| DEX0477_003.nt.1 | 105627.0 | 68.4 | 68.4 | 78.6 | 78.6 | 40.0 | 40.0 |
| DEX0477_003.nt.1 | 105627.1 | 57.9 | 61.1 | 71.4 | 71.4 | 20.0 | 25.0 |
| DEX0477_003.nt.1 | 105628.0 | 68.4 | 76.5 | 78.6 | 91.7 | 40.0 | 40.0 |
| DEX0477_003.nt.1 | 105628.1 | 68.4 | 76.5 | 78.6 | 84.6 | 40.0 | 50.0 |
| DEX0477_003.nt.2 | 96120.0 | 68.4 | 72.2 | 78.6 | 78.6 | 40.0 | 50.0 |
| DEX0477_003.nt.2 | 96120.1 | 68.4 | 76.5 | 78.6 | 84.6 | 40.0 | 50.0 |
| DEX0477_003.nt.2 | 105624.0 | 63.2 | 66.7 | 71.4 | 71.4 | 40.0 | 50.0 |
| DEX0477_003.nt.2 | 105624.1 | 52.6 | 66.7 | 64.3 | 75.0 | 20.0 | 33.3 |
| DEX0477_003.nt.2 | 105627.0 | 68.4 | 68.4 | 78.6 | 78.6 | 40.0 | 40.0 |
| DEX0477_003.nt.2 | 105627.1 | 57.9 | 61.1 | 71.4 | 71.4 | 20.0 | 25.0 |
| DEX0477_003.nt.2 | 105628.0 | 68.4 | 76.5 | 78.6 | 91.7 | 40.0 | 40.0 |
| DEX0477_003.nt.2 | 105628.1 | 68.4 | 76.5 | 78.6 | 84.6 | 40.0 | 50.0 |
| DEX0477_004.nt.1 | 1200.0 | 26.3 | 38.5 | 28.6 | 40.0 | 20.0 | 33.3 |
| DEX0477_004.nt.1 | 1201.0 | 26.3 | 33.3 | 28.6 | 33.3 | 20.0 | 33.3 |
| DEX0477_006.nt.1 | 9744.0 | 47.4 | 50.0 | 57.1 | 57.1 | 20.0 | 25.0 |
| DEX0477_006.nt.1 | 9744.1 | 42.1 | 44.4 | 50.0 | 50.0 | 20.0 | 25.0 |
| DEX0477_006.nt.1 | 9745.0 | 47.4 | 50.0 | 57.1 | 57.1 | 20.0 | 25.0 |
| DEX0477_006.nt.1 | 9745.1 | 47.4 | 56.2 | 57.1 | 66.7 | 20.0 | 25.0 |
| DEX0477_007.nt.1 | 17852.0 | 26.3 | 62.5 | 14.3 | 40.0 | 60.0 | 100.0 |
| DEX0477_007.nt.1 | 17852.1 | 26.3 | 55.6 | 14.3 | 33.3 | 60.0 | 100.0 |
| DEX0477_007.nt.1 | 17853.0 | 26.3 | 83.3 | 14.3 | 66.7 | 60.0 | 100.0 |
| DEX0477_007.nt.1 | 17853.1 | 15.8 | 75.0 | 7.1 | 50.0 | 40.0 | 100.0 |
| DEX0477_007.nt.1 | 18644.0 | 26.3 | 55.6 | 14.3 | 33.3 | 60.0 | 100.0 |
| DEX0477_007.nt.1 | 18644.1 | 31.6 | 66.7 | 21.4 | 50.0 | 60.0 | 100.0 |
| DEX0477_007.nt.1 | 18644.2 | 26.3 | 62.5 | 14.3 | 40.0 | 60.0 | 100.0 |
| DEX0477_007.nt.1 | 18644.3 | 31.6 | 60.0 | 21.4 | 42.9 | 60.0 | 100.0 |
| DEX0477_007.nt.1 | 18645.0 | 26.3 | 83.3 | 21.4 | 75.0 | 40.0 | 100.0 |
| DEX0477_007.nt.1 | 18645.1 | 31.6 | 85.7 | 21.4 | 75.0 | 60.0 | 100.0 |
| DEX0477_007.nt.1 | 18645.2 | 21.1 | 80.0 | 14.3 | 66.7 | 40.0 | 100.0 |
| DEX0477_007.nt.1 | 18645.3 | 26.3 | 83.3 | 14.3 | 66.7 | 60.0 | 100.0 |
| DEX0477_008.nt.1 | 4733.0 | 73.7 | 82.4 | 71.4 | 76.9 | 80.0 | 100.0 |
| DEX0477_008.nt.1 | 4733.1 | 73.7 | 77.8 | 71.4 | 71.4 | 80.0 | 100.0 |
| DEX0477_008.nt.1 | 4734.0 | 68.4 | 68.4 | 64.3 | 64.3 | 80.0 | 80.0 |
| DEX0477_008.nt.1 | 4734.1 | 73.7 | 73.7 | 71.4 | 71.4 | 80.0 | 80.0 |
| DEX0477_009.nt.1 | 990.0 | 26.3 | 45.5 | 28.6 | 44.4 | 20.0 | 50.0 |
| DEX0477_011.nt.1 | 102558.0 | 21.1 | 21.1 | 28.6 | 28.6 | 0.0 | 0.0 |
| DEX0477_011.nt.1 | 102558.1 | 21.1 | 21.1 | 28.6 | 28.6 | 0.0 | 0.0 |
| DEX0477_013.nt.1 | 10548.0 | 26.3 | 38.5 | 28.6 | 40.0 | 20.0 | 33.3 |
| DEX0477_013.nt.1 | 10548.1 | 36.8 | 50.0 | 42.9 | 60.0 | 20.0 | 25.0 |
| DEX0477_013.nt.1 | 10549.0 | 31.6 | 31.6 | 35.7 | 35.7 | 20.0 | 20.0 |
| DEX0477_013.nt.1 | 10549.1 | 31.6 | 31.6 | 35.7 | 35.7 | 20.0 | 20.0 |
| DEX0477_014.nt.1 | 4538.0 | 21.1 | 80.0 | 21.4 | 75.0 | 20.0 | 100.0 |
| DEX0477_014.nt.1 | 4538.1 | 26.3 | 83.3 | 21.4 | 75.0 | 40.0 | 100.0 |
| DEX0477_014.nt.1 | 4539.0 | 10.5 | 11.1 | 7.1 | 7.1 | 20.0 | 25.0 |
| DEX0477_014.nt.1 | 4539.1 | 5.3 | 5.6 | 7.1 | 7.1 | 0.0 | 0.0 |
| DEX0477_014.nt.1 | 27949.0 | 21.1 | 80.0 | 21.4 | 75.0 | 20.0 | 100.0 |
| DEX0477_014.nt.1 | 27949.1 | 26.3 | 83.3 | 21.4 | 75.0 | 40.0 | 100.0 |
| DEX0477_014.nt.1 | 27950.0 | 10.5 | 10.5 | 7.1 | 7.1 | 20.0 | 20.0 |
| DEX0477_014.nt.1 | 27950.1 | 10.5 | 10.5 | 7.1 | 7.1 | 20.0 | 20.0 |
| DEX0477_014.nt.2 | 4538.0 | 21.1 | 80.0 | 21.4 | 75.0 | 20.0 | 100.0 |
| DEX0477_014.nt.2 | 4538.1 | 26.3 | 83.3 | 21.4 | 75.0 | 40.0 | 100.0 |
| DEX0477_014.nt.2 | 4539.0 | 10.5 | 11.1 | 7.1 | 7.1 | 20.0 | 25.0 |
| DEX0477_014.nt.2 | 4539.1 | 5.3 | 5.6 | 7.1 | 7.1 | 0.0 | 0.0 |
| DEX0477_014.nt.2 | 27949.0 | 21.1 | 80.0 | 21.4 | 75.0 | 20.0 | 100.0 |
| DEX0477_014.nt.2 | 27949.1 | 26.3 | 83.3 | 21.4 | 75.0 | 40.0 | 100.0 |
| DEX0477_014.nt.2 | 27950.0 | 10.5 | 10.5 | 7.1 | 7.1 | 20.0 | 20.0 |
| DEX0477_014.nt.2 | 27950.1 | 10.5 | 10.5 | 7.1 | 7.1 | 20.0 | 20.0 |
| DEX0477_014.nt.3 | 4538.0 | 21.1 | 80.0 | 21.4 | 75.0 | 20.0 | 100.0 |
| DEX0477_014.nt.3 | 4538.1 | 26.3 | 83.3 | 21.4 | 75.0 | 40.0 | 100.0 |
| DEX0477_014.nt.3 | 4539.0 | 10.5 | 11.1 | 7.1 | 7.1 | 20.0 | 25.0 |
| DEX0477_014.nt.3 | 4539.1 | 5.3 | 5.6 | 7.1 | 7.1 | 0.0 | 0.0 |
| DEX0477_014.nt.3 | 27949.0 | 21.1 | 80.0 | 21.4 | 75.0 | 20.0 | 100.0 |
| DEX0477_014.nt.3 | 27949.1 | 26.3 | 83.3 | 21.4 | 75.0 | 40.0 | 100.0 |
| DEX0477_014.nt.3 | 27950.0 | 10.5 | 10.5 | 7.1 | 7.1 | 20.0 | 20.0 |
| DEX0477_014.nt.3 | 27950.1 | 10.5 | 10.5 | 7.1 | 7.1 | 20.0 | 20.0 |
| DEX0477_015.nt.1 | 2085.0 | 47.4 | 47.4 | 28.6 | 28.6 | 100.0 | 100.0 |
| DEX0477_015.nt.1 | 4909.0 | 47.4 | 47.4 | 28.6 | 28.6 | 100.0 | 100.0 |
| DEX0477_015.nt.1 | 4909.1 | 52.6 | 52.6 | 35.7 | [symbol] 5.7 | 100.0 | 100.0 |
| DEX0477_015.nt.1 | 4910.0 | 57.9 | 57.9 | 42.9 | 42.9 | 100.0 | 100.0 |
| DEX0477_015.nt.1 | 4910.1 | 52.6 | 52.6 | 35.7 | 35.7 | 100.0 | 100.0 |
| DEX0477_015.nt.1 | 17292.0 | 52.6 | 55.6 | 35.7 | 38.5 | 100.0 | 100.0 |
| DEX0477_015.nt.1 | 17292.1 | 52.6 | 52.6 | 35.7 | 35.7 | 100.0 | 100.0 |
| DEX0477_015.nt.1 | 17293.0 | 57.9 | 61.1 | 42.9 | 46.2 | 100.0 | 100.0 |
| DEX0477_015.nt.1 | 17293.1 | 57.9 | 57.9 | 42.9 | 42.9 | 100.0 | 100.0 |
| DEX0477_015.nt.1 | 24404.0 | 52.6 | 52.6 | 35.7 | 35.7 | 100.0 | 100.0 |
| DEX0477_015.nt.1 | 24404.1 | 52.6 | 52.6 | 35.7 | 35.7 | 100.0 | 100.0 |
| DEX0477_015.nt.1 | 24405.0 | 52.6 | 55.6 | 35.7 | 38.5 | 100.0 | 100.0 |
| DEX0477_015.nt.1 | 24405.1 | 52.6 | 55.6 | 35.7 | 38.5 | 100.0 | 100.0 |
| DEX0477_015.nt.2 | 2085.0 | 47.4 | 47.4 | 28.6 | 28.6 | 100.0 | 100.0 |
| DEX0477_015.nt.2 | 4909.0 | 47.4 | 47.4 | 28.6 | 28.6 | 100.0 | 100.0 |
| DEX0477_015.nt.2 | 4909.1 | 52.6 | 52.6 | 35.7 | 35.7 | 100.0 | 100.0 |
| DEX0477_015.nt.2 | 4910.0 | 57.9 | 57.9 | 42.9 | 42.9 | 100.0 | 100.0 |
| DEX0477_015.nt.2 | 4910.1 | 52.6 | 52.6 | 35.7 | 35.7 | 100.0 | 100.0 |
| DEX0477_015.nt.2 | 17292.0 | 52.6 | 55.6 | 35.7 | 38.5 | 100.0 | 100.0 |
| DEX0477_015.nt.2 | 17292.1 | 52.6 | 52.6 | 35.7 | 35.7 | 100.0 | 100.0 |
| DEX0477_015.nt.2 | 17293.0 | 57.9 | 61.1 | 42.9 | 46.2 | 100.0 | 100.0 |
| DEX0477_015.nt.2 | 17293.1 | 57.9 | 57.9 | 42.9 | 42.9 | 100.0 | 100.0 |
| DEX0477_015.nt.2 | 24404.0 | 52.6 | 52.6 | 35.7 | 35.7 | 100.0 | 100.0 |
| DEX0477_015.nt.2 | 24404.1 | 52.6 | 52.6 | 35.7 | 35.7 | 100.0 | 100.0 |
| DEX0477_015.nt.2 | 24405.0 | 52.6 | 55.6 | 35.7 | 38.5 | 100.0 | 100.0 |
| DEX0477_015.nt.2 | 24405.1 | 52.6 | 55.6 | 35.7 | 38.5 | 100.0 | 100.0 |
| DEX0477_016.nt.1 | 33428.0 | 78.9 | 83.3 | 85.7 | 92.3 | 60.0 | 60.0 |
| DEX0477_016.nt.1 | 33428.1 | 78.9 | 78.9 | 85.7 | 85.7 | 60.0 | 60.0 |
| DEX0477_016.nt.1 | 33429.0 | 57.9 | 78.6 | 78.6 | 84.6 | 0.0 | 0.0 |
| DEX0477_016.nt.1 | 33429.1 | 73.7 | 73.7 | 78.6 | 78.6 | 60.0 | 60.0 |
| DEX0477_016.nt.1 | 37143.0 | 78.9 | 78.9 | 85.7 | 85.7 | 60.0 | 60.0 |
| DEX0477_016.nt.1 | 37143.1 | 78.9 | 78.9 | 85.7 | 85.7 | 60.0 | 60.0 |
| DEX0477_016.nt.1 | 37143.2 | 78.9 | 78.9 | 85.7 | 85.7 | 60.0 | 60.0 |
| DEX0477_016.nt.1 | 37143.3 | 73.7 | 77.8 | 78.6 | 84.6 | 60.0 | 60.0 |
| DEX0477_016.nt.1 | 37143.4 | 78.9 | 78.9 | 85.7 | 85.7 | 60.0 | 60.0 |
| DEX0477_016.nt.1 | 39533.0 | 78.9 | 78.9 | 85.7 | 85.7 | 60.0 | 60.0 |
| DEX0477_016.nt.1 | 39533.1 | 78.9 | 78.9 | 85.7 | 85.7 | 60.0 | 60.0 |
| DEX0477_016.nt.1 | 39534.0 | 78.9 | 78.9 | 85.7 | 85.7 | 60.0 | 60.0 |
| DEX0477_016.nt.1 | 39534.1 | 78.9 | 83.3 | 85.7 | 92.3 | 60.0 | 60.0 |
| DEX0477_016.nt.2 | 33428.0 | 78.9 | 83.3 | 85.7 | 92.3 | 60.0 | 60.0 |
| DEX0477_016.nt.2 | 33428.1 | 78.9 | 78.9 | 85.7 | 85.7 | 60.0 | 60.0 |
| DEX0477_016.nt.2 | 33429.0 | 57.9 | 78.6 | 78.6 | 84.6 | 0.0 | 0.0 |
| DEX0477_016.nt.2 | 33429.1 | 73.7 | 73.7 | 78.6 | 78.6 | 60.0 | 60.0 |
| DEX0477_016.nt.2 | 37143.0 | 78.9 | 78.9 | 85.7 | 85.7 | 60.0 | 60.0 |
| DEX0477_016.nt.2 | 37143.1 | 78.9 | 78.9 | 85.7 | 85.7 | 60.0 | 60.0 |
| DEX0477_016.nt.2 | 37143.2 | 78.9 | 78.9 | 85.7 | 85.7 | 60.0 | 60.0 |
| DEX0477_016.nt.2 | 37143.3 | 73.7 | 77.8 | 78.6 | 84.6 | 60.0 | 60.0 |
| DEX0477_016.nt.2 | 37143.4 | 78.9 | 78.9 | 85.7 | 85.7 | 60.0 | 60.0 |
| DEX0477_016.nt.2 | 39533.0 | 78.9 | 78.9 | 85.7 | 85.7 | 60.0 | 60.0 |
| DEX0477_016.nt.2 | 39533.1 | 78.9 | 78.9 | 85.7 | 85.7 | 60.0 | 60.0 |
| DEX0477_016.nt.2 | 39534.0 | 78.9 | 78.9 | 85.7 | 85.7 | 60.0 | 60.0 |
| DEX0477_016.nt.2 | 39534.1 | 78.9 | 83.3 | 85.7 | 92.3 | 60.0 | 60.0 |
| DEX0477_016.nt.4 | 33428.0 | 78.9 | 83.3 | 85.7 | 92.3 | 60.0 | 60.0 |
| DEX0477_016.nt.4 | 33428.1 | 78.9 | 78.9 | 85.7 | 85.7 | 60.0 | 60.0 |
| DEX0477_016.nt.4 | 33429.0 | 57.9 | 78.6 | 78.6 | 84.6 | 0.0 | 0.0 |
| DEX0477_016.nt.4 | 33429.1 | 73.7 | 73.7 | 78.6 | 78.6 | 60.0 | 60.0 |
| DEX0477_016.nt.4 | 37143.0 | 78.9 | 78.9 | 85.7 | 85.7 | 60.0 | 60.0 |
| DEX0477_016.nt.4 | 37143.1 | 78.9 | 78.9 | 85.7 | 85.7 | 60.0 | 60.0 |
| DEX0477_016.nt.4 | 37143.2 | 78.9 | [symbol] .9 | 85.7 | 85.7 | 60.0 | 60.0 |
| DEX0477_016.nt.4 | 37143.3 | 73.7 | 77.8 | 78.6 | 84.6 | 60.0 | 60.0 |
| DEX0477_016.nt.4 | 37143.4 | 78.9 | 78.9 | 85.7 | 85.7 | 60.0 | 60.0 |
| DEX0477_016.nt.4 | 39533.0 | 78.9 | 78.9 | 85.7 | 85.7 | 60.0 | 60.0 |
| DEX0477_016.nt.4 | 39533.1 | 78.9 | 78.9 | 85.7 | 85.7 | 60.0 | 60.0 |
| DEX0477_016.nt.4 | 39534.0 | 78.9 | 78.9 | 85.7 | 85.7 | 60.0 | 60.0 |
| DEX0477_016.nt.4 | 39534.1 | 78.9 | 83.3 | 85.7 | 92.3 | 60.0 | 60.0 |
| DEX0477_016.nt.5 | 33428.0 | 78.9 | 83.3 | 85.7 | 92.3 | 60.0 | 60.0 |
| DEX0477_016.nt.5 | 33428.1 | 78.9 | 78.9 | 85.7 | 85.7 | 60.0 | 60.0 |
| DEX0477_016.nt.5 | 33429.0 | 57.9 | 78.6 | 78.6 | 84.6 | 0.0 | 0.0 |
| DEX0477_016.nt.5 | 33429.1 | 73.7 | 73.7 | 78.6 | 78.6 | 60.0 | 60.0 |
| DEX0477_016.nt.5 | 37143.0 | 78.9 | 78.9 | 85.7 | 85.7 | 60.0 | 60.0 |
| DEX0477_016.nt.5 | 37143.1 | 78.9 | 78.9 | 85.7 | 85.7 | 60.0 | 60.0 |
| DEX0477_016.nt.5 | 37143.2 | 78.9 | 78.9 | 85.7 | 85.7 | 60.0 | 60.0 |
| DEX0477_016.nt.5 | 37143.3 | 73.7 | 77.8 | 78.6 | 84.6 | 60.0 | 60.0 |
| DEX0477_016.nt.5 | 37143.4 | 78.9 | 78.9 | 85.7 | 85.7 | 60.0 | 60.0 |
| DEX0477_016.nt.5 | 39533.0 | 78.9 | 78.9 | 85.7 | 85.7 | 60.0 | 60.0 |
| DEX0477_016.nt.5 | 39533.1 | 78.9 | 78.9 | 85.7 | 85.7 | 60.0 | 60.0 |
| DEX0477_016.nt.5 | 39534.0 | 78.9 | 78.9 | 85.7 | 85.7 | 60.0 | 60.0 |
| DEX0477_016.nt.5 | 39534.1 | 78.9 | 83.3 | 85.7 | 92.3 | 60.0 | 60.0 |
| DEX0477_018.nt.1 | 102557.0 | 21.1 | 22.2 | 28.6 | 28.6 | 0.0 | 0.0 |
| DEX0477_018.nt.1 | 102557.1 | 26.3 | 27.8 | 35.7 | 35.7 | 0.0 | 0.0 |
| DEX0477_018.nt.1 | 102558.0 | 21.1 | 21.1 | 28.6 | 28.6 | 0.0 | 0.0 |
| DEX0477_018.nt.1 | 102558.1 | 21.1 | 21.1 | 28.6 | 28.6 | 0.0 | 0.0 |
| DEX0477_019.nt.1 | 41937.0 | 26.3 | 100.0 | 21.4 | 100.0 | 40.0 | 100.0 |
| DEX0477_019.nt.1 | 41937.1 | 21.1 | 66.7 | 14.3 | 50.0 | 40.0 | 100.0 |
| DEX0477_019.nt.1 | 41937.2 | 26.3 | 83.3 | 21.4 | 75.0 | 40.0 | 100.0 |
| DEX0477_019.nt.1 | 41938.0 | 21.1 | 57.1 | 14.3 | 40.0 | 40.0 | 100.0 |
| DEX0477_019.nt.1 | 41938.1 | 26.3 | 50.0 | 21.4 | 37.5 | 40.0 | 100.0 |
| DEX0477_019.nt.1 | 41938.2 | 26.3 | 50.0 | 14.3 | 28.6 | 60.0 | 100.0 |
| DEX0477_019.nt.1 | 41939.0 | 31.6 | 50.0 | 21.4 | 33.3 | 60.0 | 100.0 |
| DEX0477_019.nt.1 | 41939.1 | 31.6 | 60.0 | 21.4 | 42.9 | 60.0 | 100.0 |
| DEX0477_019.nt.1 | 41939.2 | 31.6 | 66.7 | 21.4 | 50.0 | 60.0 | 100.0 |
| DEX0477_019.nt.1 | 41940.0 | 26.3 | 45.5 | 14.3 | 25.0 | 60.0 | 100.0 |
| DEX0477_019.nt.1 | 41940.1 | 31.6 | 54.5 | 21.4 | 37.5 | 60.0 | 100.0 |
| DEX0477_019.nt.1 | 41940.2 | 31.6 | 46.2 | 21.4 | 30.0 | 60.0 | 100.0 |
| DEX0477_019.nt.1 | 78627.0 | 21.1 | 100.0 | 14.3 | 100.0 | 40.0 | 100.0 |
| DEX0477_019.nt.1 | 78627.1 | 21.1 | 100.0 | 14.3 | 100.0 | 40.0 | 100.0 |
| DEX0477_019.nt.1 | 78628.0 | 21.1 | 80.0 | 14.3 | 66.7 | 40.0 | 100.0 |
| DEX0477_019.nt.1 | 78628.1 | 21.1 | 100.0 | 14.3 | 100.0 | 40.0 | 100.0 |
| DEX0477_019.nt.1 | 94127.0 | 26.3 | 71.4 | 14.3 | 50.0 | 60.0 | 100.0 |
| DEX0477_019.nt.1 | 94127.1 | 31.6 | 66.7 | 21.4 | 50.0 | 60.0 | 100.0 |
| DEX0477_019.nt.1 | 94128.0 | 15.8 | 100.0 | 14.3 | 100.0 | 20.0 | 100.0 |
| DEX0477_019.nt.1 | 94128.1 | 21.1 | 100.0 | 14.3 | 100.0 | 40.0 | 100.0 |
| DEX0477_019.nt.1 | 102785.0 | 26.3 | 62.5 | 14.3 | 40.0 | 60.0 | 100.0 |
| DEX0477_019.nt.1 | 102785.1 | 26.3 | 62.5 | 14.3 | 40.0 | 60.0 | 100.0 |
| DEX0477_019.nt.1 | 102786.0 | 15.8 | 75.0 | 14.3 | 66.7 | 20.0 | 100.0 |
| DEX0477_019.nt.1 | 102786.1 | 15.8 | 100.0 | 14.3 | 100.0 | 20.0 | 100.0 |
| DEX0477_019.nt.1 | 102787.0 | 15.8 | 50.0 | 14.3 | 40.0 | 20.0 | 100.0 |
| DEX0477_019.nt.1 | 102787.1 | 10.5 | 100.0 | 7.1 | 100.0 | 20.0 | 100.0 |
| DEX0477_019.nt.1 | 102789.0 | 15.8 | 100.0 | 14.3 | 100.0 | 20.0 | 100.0 |
| DEX0477_019.nt.1 | 102789.1 | 15.8 | 100.0 | 14.3 | 100.0 | 20.0 | 100.0 |
| DEX0477_020.nt.1 | 41937.0 | 26.3 | 100.0 | 21.4 | 100.0 | 40.0 | 100.0 |
| DEX0477_020.nt.1 | 41937.1 | 21.1 | 66.7 | 14.3 | 50.0 | 40.0 | 100.0 |
| DEX0477_020.nt.1 | 41937.2 | 26.3 | 83.3 | 21.4 | 75.0 | 40.0 | 100.0 |
| DEX0477_020.nt.1 | 41938.0 | 21.1 | 5 [symbol] .1 | 14.3 | 40.0 | 40.0 | 100.0 |
| DEX0477_020.nt.1 | 41938.1 | 26.3 | 50.0 | 21.4 | 37.5 | 40.0 | 100.0 |
| DEX0477_020.nt.1 | 41938.2 | 26.3 | 50.0 | 14.3 | 28.6 | 60.0 | 100.0 |
| DEX0477_020.nt.1 | 41939.0 | 31.6 | 50.0 | 21.4 | 33.3 | 60.0 | 100.0 |
| DEX0477_020.nt.1 | 41939.1 | 31.6 | 60.0 | 21.4 | 42.9 | 60.0 | 100.0 |
| DEX0477_020.nt.1 | 41939.2 | 31.6 | 66.7 | 21.4 | 50.0 | 60. [symbol] | 100.0 |
| DEX0477_020.nt.1 | 41940.0 | 26.3 | 45.5 | 14.3 | 25.0 | 60.0 | 100.0 |
| DEX0477_020.nt.1 | 41940.1 | 31.6 | 54.5 | 21.4 | 37.5 | 60.0 | 100.0 |
| DEX0477_020.nt.1 | 41940.2 | 31.6 | 46.2 | 21.4 | 30.0 | 60.0 | 100.0 |
| DEX0477_020.nt.1 | 78627.0 | 21.1 | 100.0 | 14.3 | 100.0 | 40.0 | 100.0 |
| DEX0477_020.nt.1 | 78627.1 | 21.1 | 100.0 | 14.3 | 100.0 | 40.0 | 100.0 |
| DEX0477_020.nt.1 | 78628.0 | 21.1 | 80.0 | 14.3 | 66.7 | 40.0 | 100.0 |
| DEX0477_020.nt.1 | 78628.1 | 21.1 | 100.0 | 14.3 | 100.0 | 40.0 | 100.0 |
| DEX0477_020.nt.1 | 94128.0 | 15.8 | 100.0 | 14.3 | 100.0 | 20.0 | 100.0 |
| DEX0477_020.nt.1 | 94128.1 | 21.1 | 100.0 | 14.3 | 100.0 | 40.0 | 100.0 |
| DEX0477_020.nt.1 | 102786.0 | 15.8 | 75.0 | 14.3 | 66.7 | 20.0 | 100.0 |
| DEX0477_020.nt.1 | 102786.1 | 15.8 | 100.0 | 14.3 | 100.0 | 20.0 | 100.0 |
| DEX0477_020.nt.1 | 102787.0 | 15.8 | 50.0 | 14.3 | 40.0 | 20.0 | 100.0 |
| DEX0477_020.nt.1 | 102787.1 | 10.5 | 100.0 | 7.1 | 100.0 | 20.0 | 100.0 |
| DEX0477_020.nt.1 | 102789.0 | 15.8 | 100.0 | 14.3 | 100.0 | 20.0 | 100.0 |
| DEX0477_020.nt.1 | 102789.1 | 15.8 | 100.0 | 14.3 | 100.0 | 20.0 | 100.0 |
| DEX0477_020.nt.2 | 41937.0 | 26.3 | 100.0 | 21.4 | 100.0 | 40.0 | 100.0 |
| DEX0477_020.nt.2 | 41937.1 | 21.1 | 66.7 | 14.3 | 50.0 | 40.0 | 100.0 |
| DEX0477_020.nt.2 | 41937.2 | 26.3 | 83.3 | 21.4 | 75.0 | 40.0 | 100.0 |
| DEX0477_020.nt.2 | 41938.0 | 21.1 | 57.1 | 14.3 | 40.0 | 40.0 | 100.0 |
| DEX0477_020.nt.2 | 41938.1 | 26.3 | 50.0 | 21.4 | 37.5 | 40.0 | 100.0 |
| DEX0477_020.nt.2 | 41938.2 | 26.3 | 50.0 | 14.3 | 28.6 | 60.0 | 100.0 |
| DEX0477_020.nt.2 | 41939.0 | 31.6 | 50.0 | 21.4 | 33.3 | 60.0 | 100.0 |
| DEX0477_020.nt.2 | 41939.1 | 31.6 | 60.0 | 21.4 | 42.9 | 60.0 | 100.0 |
| DEX0477_020.nt.2 | 41939.2 | 31.6 | 66.7 | 21.4 | 50.0 | 60.0 | 100.0 |
| DEX0477_020.nt.2 | 41940.0 | 26.3 | 45.5 | 14.3 | 25.0 | 60.0 | 100.0 |
| DEX0477_020.nt.2 | 41940.1 | 31.6 | 54.5 | 21.4 | 37.5 | 60.0 | 100.0 |
| DEX0477_020.nt.2 | 41940.2 | 31.6 | 46.2 | 21.4 | 30.0 | 60.0 | 100.0 |
| DEX0477_020.nt.2 | 78627.0 | 21.1 | 100.0 | 14.3 | 100.0 | 40.0 | 100.0 |
| DEX0477_020.nt.2 | 78627.1 | 21.1 | 100.0 | 14.3 | 100.0 | 40.0 | 100.0 |
| DEX0477_020.nt.2 | 78628.0 | 21.1 | 80.0 | 14.3 | 66.7 | 40.0 | 100.0 |
| DEX0477_020.nt.2 | 78628.1 | 21.1 | 100.0 | 14.3 | 100.0 | 40.0 | 100.0 |
| DEX0477_020.nt.2 | 94128.0 | 15.8 | 100.0 | 14.3 | 100.0 | 20.0 | 100.0 |
| DEX0477_020.nt.2 | 94128.1 | 21.1 | 100.0 | 14.3 | 100.0 | 40.0 | 100.0 |
| DEX0477_020.nt.2 | 102786.0 | 15.8 | 75.0 | 14.3 | 66.7 | 20.0 | 100.0 |
| DEX0477_020.nt.2 | 102786.1 | 15.8 | 100.0 | 14.3 | 100.0 | 20.0 | 100.0 |
| DEX0477_020.nt.2 | 102787.0 | 15.8 | 50.0 | 14.3 | 40.0 | 20.0 | 100.0 |
| DEX0477_020.nt.2 | 102787.1 | 10.5 | 100.0 | 7.1 | 100.0 | 20.0 | 100.0 |
| DEX0477_020.nt.2 | 102789.0 | 15.8 | 100.0 | 14.3 | 100.0 | 20.0 | 100.0 |
| DEX0477_020.nt.2 | 102789.1 | 15.8 | 100.0 | 14.3 | 100.0 | 20.0 | 100.0 |
| DEX0477_021.nt.1 | 26770.0 | 42.1 | 80.0 | 28.6 | 66.7 | 80.0 | 100.0 |
| DEX0477_021.nt.1 | 26770.1 | 47.4 | 81.8 | 28.6 | 66.7 | 100.0 | 100.0 |
| DEX0477_021.nt.1 | 26771.0 | 47.4 | 90.0 | 28.6 | 80.0 | 100.0 | 100.0 |
| DEX0477_021.nt.1 | 26771.1 | 47.4 | 81.8 | 28.6 | 66.7 | 100.0 | 100.0 |
| DEX0477_021.nt.1 | 33088.0 | 52.6 | 83.3 | 42.9 | 75.0 | 80.0 | 100.0 |
| DEX0477_021.nt.1 | 33088.1 | 47.4 | 90.0 | 35.7 | 83.3 | 80.0 | 100.0 |
| DEX0477_021.nt.1 | 33088.2 | 52.6 | 100.0 | 35.7 | 100.0 | 100.0 | 100.0 |
| DEX0477_021.nt.1 | 33088.3 | 47.4 | 81.8 | 35.7 | 71.4 | 80.0 | 100.0 |
| DEX0477_021.nt.1 | 33089.0 | 42.1 | 88.9 | 35.7 | 83.3 | 60.0 | 100.0 |
| DEX0477_021.nt.1 | 33089.1 | 47.4 | 90.0 | 35.7 | 83.3 | 80.0 | 100.0 |
| DEX0477_021.nt.1 | 33089.2 | 21.1 | 80.0 | 14.3 | 66.7 | 40.0 | 100.0 |
| DEX0477_021.nt.1 | 33089.3 | 36.8 | 77.8 | 35.7 | 71.4 | 40.0 | 100.0 |
| DEX0477_021.nt.1 | 41945.0 | 36.8 | 70.0 | 28.6 | 57.1 | 60.0 | 100.0 |
| DEX0477_021.nt.1 | 41945.1 | 36.8 | 77.8 | 28.6 | 66.7 | 60.0 | 100.0 |
| DEX0477_021.nt.1 | 41945.2 | 36.8 | 77.8 | 28.6 | 66.7 | 60.0 | 100.0 |
| DEX0477_021.nt.1 | 41945.3 | 36.8 | 87.5 | 28.6 | 80.0 | 60.0 | 100.0 |
| DEX0477_021.nt.1 | 41945.4 | 36.8 | 87.5 | 28.6 | 80.0 | 60.0 | 100.0 |
| DEX0477_021.nt.1 | 41946.0 | 36.8 | 70.0 | 28.6 | 57.1 | 60.0 | 100.0 |
| DEX0477_021.nt.1 | 41946.1 | 36.8 | 77.8 | 28.6 | 66.7 | 60.0 | 100.0 |
| DEX0477_021.nt.1 | 41946.2 | 36.8 | 87.5 | 28.6 | 80.0 | 60.0 | 100.0 |
| DEX0477_021.nt.1 | 41946.3 | 36.8 | 77.8 | 28.6 | 66.7 | 60.0 | 100.0 |
| DEX0477_021.nt.1 | 41946.4 | 36.8 | 77.8 | 28.6 | 66.7 | 60.0 | 100.0 |
| DEX0477_021.nt.2 | 26770.0 | 42.1 | 80.0 | 28.6 | 66.7 | 80.0 | 100.0 |
| DEX0477_021.nt.2 | 26770.1 | 47.4 | 81.8 | 28.6 | 66.7 | 100.0 | 100.0 |
| DEX0477_021.nt.2 | 26771.0 | 47.4 | 90.0 | 28.6 | 80.0 | 100.0 | 100.0 |
| DEX0477_021.nt.2 | 26771.1 | 47.4 | 81.8 | 28.6 | 66.7 | 100.0 | 100.0 |
| DEX0477_021.nt.2 | 33088.0 | 52.6 | 83.3 | 42.9 | 75.0 | 80.0 | 100.0 |
| DEX0477_021.nt.2 | 33088.1 | 47.4 | 90.0 | 35.7 | 83.3 | 80.0 | 100.0 |
| DEX0477_021.nt.2 | 33088.2 | 52.6 | 100.0 | 35.7 | 100.0 | 100.0 | 100.0 |
| DEX0477_021.nt.2 | 33088.3 | 47.4 | 81.8 | 35.7 | 71.4 | 80.0 | 100.0 |
| DEX0477_021.nt.2 | 33089.0 | 42.1 | 88.9 | 35.7 | 83.3 | 60.0 | 100.0 |
| DEX0477_021.nt.2 | 33089.1 | 47.4 | 90.0 | 35.7 | 83.3 | 80.0 | 100.0 |
| DEX0477_021.nt.2 | 33089.2 | 21.1 | 80.0 | 14.3 | 66.7 | 40.0 | 100.0 |
| DEX0477_021.nt.2 | 33089.3 | 36.8 | 77.8 | 35.7 | 71.4 | 40.0 | 100.0 |
| DEX0477_021.nt.2 | 41945.0 | 36.8 | 70.0 | 28.6 | 57.1 | 60.0 | 100.0 |
| DEX0477_021.nt.2 | 41945.1 | 36.8 | 77.8 | 28.6 | 66.7 | 60.0 | 100.0 |
| DEX0477_021.nt.2 | 41945.2 | 36.8 | 77.8 | 28.6 | 66.7 | 60.0 | 100.0 |
| DEX0477_021.nt.2 | 41945.3 | 36.8 | 87.5 | 28.6 | 80.0 | 60.0 | 100.0 |
| DEX0477_021.nt.2 | 41945.4 | 36.8 | 87.5 | 28.6 | 80.0 | 60.0 | 100.0 |
| DEX0477_021.nt.2 | 41946.0 | 36.8 | 70.0 | 28.6 | 57.1 | 60.0 | 100.0 |
| DEX0477_021.nt.2 | 41946.1 | 36.8 | 77.8 | 28.6 | 66.7 | 60.0 | 100.0 |
| DEX0477_021.nt.2 | 41946.2 | 36.8 | 87.5 | 28.6 | 80.0 | 60.0 | 100.0 |
| DEX0477_021.nt.2 | 41946.3 | 36.8 | 77.8 | 28.6 | 66.7 | 60.0 | 100.0 |
| DEX0477_021.nt.2 | 41946.4 | 36.8 | 77.8 | 28.6 | 66.7 | 60.0 | 100.0 |
| DEX0477_022.nt.1 | 41937.0 | 26.3 | 100.0 | 21.4 | 100.0 | 40.0 | 100.0 |
| DEX0477_022.nt.1 | 41937.1 | 21.1 | 66.7 | 14.3 | 50.0 | 40.0 | 100.0 |
| DEX0477_022.nt.1 | 41937.2 | 26.3 | 83.3 | 21.4 | 75.0 | 40.0 | 100.0 |
| DEX0477_022.nt.1 | 41939.0 | 31.6 | 50.0 | 21.4 | 33.3 | 60.0 | 100.0 |
| DEX0477_022.nt.1 | 41939.1 | 31.6 | 60.0 | 21.4 | 42.9 | 60.0 | 100.0 |
| DEX0477_022.nt.1 | 41939.2 | 31.6 | 66.7 | 21.4 | 50.0 | 60.0 | 100.0 |
| DEX0477_022.nt.1 | 41940.0 | 26.3 | 45.5 | 14.3 | 25.0 | 60.0 | 100.0 |
| DEX0477_022.nt.1 | 41940.1 | 31.6 | 54.5 | 21.4 | 37.5 | 60.0 | 100.0 |
| DEX0477_022.nt.1 | 41940.2 | 31.6 | 46.2 | 21.4 | 30.0 | 60.0 | 100.0 |
| DEX0477_022.nt.1 | 78627.0 | 21.1 | 100.0 | 14.3 | 100.0 | 40.0 | 100.0 |
| DEX0477_022.nt.1 | 78627.1 | 21.1 | 100.0 | 14.3 | 100.0 | 40.0 | 100.0 |
| DEX0477_022.nt.1 | 78628.0 | 21.1 | 80.0 | 14.3 | 66.7 | 40.0 | 100.0 |
| DEX0477_022.nt.1 | 78628.1 | 21.1 | 100.0 | 14.3 | 100.0 | 40.0 | 100.0 |
| DEX0477_023.nt.1 | 33088.0 | 52.6 | 83.3 | 42.9 | 75.0 | 80.0 | 100.0 |
| DEX0477_023.nt.1 | 33088.1 | 47.4 | 90.0 | 35.7 | 83.3 | 80.0 | 100.0 |
| DEX0477_023.nt.1 | 33088.2 | 52.6 | 100.0 | 35.7 | 100.0 | 100.0 | 100.0 |
| DEX0477_023.nt.1 | 33088.3 | 47.4 | 81.8 | 35.7 | 71.4 | 80.0 | 100.0 |
| DEX0477_024.nt.1 | 26770.0 | 42.1 | 80.0 | 28.6 | 66.7 | 80.0 | 100.0 |
| DEX0477_024.nt.1 | 26770.1 | 47.4 | 81.8 | 28.6 | 66.7 | 100.0 | 100.0 |
| DEX0477_024.nt.1 | 26771.0 | 47.4 | 90.0 | 28.6 | 80.0 | 100.0 | 100.0 |
| DEX0477_024.nt.1 | 26771.1 | 47.4 | 81.8 | 28.6 | 66.7 | 100.0 | 100.0 |
| DEX0477_024.nt.1 | 41945.0 | 36.8 | 70.0 | 28.6 | 57.1 | 60.0 | 100.0 |
| DEX0477_024.nt.1 | 41945.1 | 36.8 | 77.8 | 28.6 | 66.7 | 60.0 | 100.0 |
| DEX0477_024.nt.1 | 41945.2 | 36.8 | 77.8 | 28.6 | 66.7 | 60.0 | 100.0 |
| DEX0477_024.nt.1 | 41945.3 | 36.8 | 87.5 | 28.6 | 80.0 | 60.0 | 100.0 |
| DEX0477_024.nt.1 | 41945.4 | 36.8 | 87.5 | 28.6 | 80.0 | 60.0 | 100.0 |
| DEX0477_024.nt.1 | 41946.0 | 36.8 | 70.0 | 28.6 | 57.1 | 60.0 | 100.0 |
| DEX0477_024.nt.1 | 41946.1 | 36.8 | 77.8 | 28.6 | 66.7 | 60.0 | 100.0 |
| DEX0477_024.nt.1 | 41946.2 | 36.8 | 87.5 | 28.6 | 80.0 | 60.0 | 100.0 |
| DEX0477_024.nt.1 | 41946.3 | 36.8 | 77.8 | 28.6 | 66.7 | 60.0 | 100.0 |
| DEX0477_024.nt.1 | 41946.4 | 36.8 | 77.8 | 28.6 | 66.7 | 60.0 | 100.0 |
| DEX0477_024.nt.2 | 26770.0 | 42.1 | 80.0 | 28.6 | 66.7 | 80.0 | 100.0 |
| DEX0477_024.nt.2 | 26770.1 | 47.4 | 81.8 | 28.6 | 66.7 | 100.0 | 100.0 |
| DEX0477_024.nt.2 | 26771.0 | 47.4 | 90.0 | 28.6 | 80.0 | 100.0 | 100.0 |
| DEX0477_024.nt.2 | 26771.1 | 47.4 | 81.8 | 28.6 | 66.7 | 100.0 | 100.0 |
| DEX0477_024.nt.2 | 41945.0 | 36.8 | 70.0 | 28.6 | 57.1 | 60.0 | 100.0 |
| DEX0477_024.nt.2 | 41945.1 | 36.8 | 77.8 | 28.6 | 66.7 | 60.0 | 100.0 |
| DEX0477_024.nt.2 | 41945.2 | 36.8 | 77.8 | 28.6 | 66.7 | 60.0 | 100.0 |
| DEX0477_024.nt.2 | 41945.3 | 36.8 | 87.5 | 28.6 | 80.0 | 60.0 | 100.0 |
| DEX0477_024.nt.2 | 41945.4 | 36.8 | 87.5 | 28.6 | 80.0 | 60.0 | 100.0 |
| DEX0477_024.nt.2 | 41946.0 | 36.8 | 70.0 | 28.6 | 57.1 | 60.0 | 100.0 |
| DEX0477_024.nt.2 | 41946.1 | 36.8 | 77.8 | 28.6 | 66.7 | 60.0 | 100.0 |
| DEX0477_024.nt.2 | 41946.2 | 36.8 | 87.5 | 28.6 | 80.0 | 60.0 | 100.0 |
| DEX0477_024.nt.2 | 41946.3 | 36.8 | 77.8 | 28.6 | 66.7 | 60.0 | 100.0 |
| DEX0477_024.nt.2 | 41946.4 | 36.8 | 77.8 | 28.6 | 66.7 | 60.0 | 100.0 |
| DEX0477_024.nt.3 | 26770.0 | 42.1 | 80.0 | 28.6 | 66.7 | 80.0 | 100.0 |
| DEX0477_024.nt.3 | 26770.1 | 47.4 | 81.8 | 28.6 | 66.7 | 100.0 | 100.0 |
| DEX0477_024.nt.3 | 26771.0 | 47.4 | 90.0 | 28.6 | 80.0 | 100.0 | 100.0 |
| DEX0477_024.nt.3 | 26771.1 | 47.4 | 81.8 | 28.6 | 66.7 | 100.0 | 100.0 |
| DEX0477_024.nt.3 | 41945.0 | 36.8 | 70.0 | 28.6 | 57.1 | 60.0 | 100.0 |
| DEX0477_024.nt.3 | 41945.1 | 36.8 | 77.8 | 28.6 | 66.7 | 60.0 | 100.0 |
| DEX0477_024.nt.3 | 41945.2 | 36.8 | 77.8 | 28.6 | 66.7 | 60.0 | 100.0 |
| DEX0477_024.nt.3 | 41945.3 | 36.8 | 87.5 | 28.6 | 80.0 | 60.0 | 100.0 |
| DEX0477_024.nt.3 | 41945.4 | 36.8 | 87.5 | 28.6 | 80.0 | 60.0 | 100.0 |
| DEX0477_024.nt.3 | 41946.0 | 36.8 | 70.0 | 28.6 | 57.1 | 60.0 | 100.0 |
| DEX0477_024.nt.3 | 41946.1 | 36.8 | 77.8 | 28.6 | 66.7 | 60.0 | 100.0 |
| DEX0477_024.nt.3 | 41946.2 | 36.8 | 87.5 | 28.6 | 80.0 | 60.0 | 100.0 |
| DEX0477_024.nt.3 | 41946.3 | 36.8 | 77.8 | 28.6 | 66.7 | 60.0 | 100.0 |
| DEX0477_024.nt.3 | 41946.4 | 36.8 | 77.8 | 28.6 | 66.7 | 60.0 | 100.0 |
| DEX0477_024.nt.4 | 26770.0 | 42.1 | 80.0 | 28.6 | 66.7 | 80.0 | 100.0 |
| DEX0477_024.nt.4 | 26770.1 | 47.4 | 81.8 | 28.6 | 66.7 | 100.0 | 100.0 |
| DEX0477_024.nt.4 | 41945.0 | 36.8 | 70.0 | 28.6 | 57.1 | 60.0 | 100.0 |
| DEX0477_024.nt.4 | 41945.1 | 36.8 | 77.8 | 28.6 | 66.7 | 60.0 | 100.0 |
| DEX0477_024.nt.4 | 41945.2 | 36.8 | 77.8 | 28.6 | 66.7 | 60.0 | 100.0 |
| DEX0477_024.nt.4 | 41945.3 | 36.8 | 87.5 | 28.6 | 80.0 | 60.0 | 100.0 |
| DEX0477_024.nt.4 | 41945.4 | 36.8 | 87.5 | 28.6 | 80.0 | 60.0 | 100.0 |
| DEX0477_024.nt.4 | 41946.0 | 36.8 | 70.0 | 28.6 | 57.1 | 60.0 | 100.0 |
| DEX0477_024.nt.4 | 41946.1 | 36.8 | 77.8 | 28.6 | 66.7 | 60.0 | 100.0 |
| DEX0477_024.nt.4 | 41946.2 | 36.8 | 87.5 | 28.6 | 80.0 | 60.0 | 100.0 |
| DEX0477_024.nt.4 | 41946.3 | 36.8 | 77.8 | 28.6 | 66.7 | 60.0 | 100.0 |
| DEX0477_024.nt.4 | 41946.4 | 36.8 | 77.8 | 28.6 | 66.7 | 60.0 | 100.0 |
| DEX0477_027.nt.1 | 2441.0 | 31.6 | 31.6 | 42.9 | 42.9 | 0.0 | 0.0 |
| DEX0477_027.nt.1 | 5236.0 | 36.8 | 36.8 | 50.0 | 50.0 | 0.0 | 0.0 |
| DEX0477_027.nt.2 | 2441.0 | 31.6 | 31.6 | 42.9 | 42.9 | 0.0 | 0.0 |
| DEX0477_027.nt.2 | 5236.0 | 36.8 | 36.8 | 50.0 | 50.0 | 0.0 | 0.0 |
| DEX0477_027.nt.3 | 2441.0 | 31.6 | 31.6 | 42.9 | 42.9 | 0.0 | 0.0 |
| DEX0477_027.nt.3 | 5236.0 | 36.8 | 36.8 | 50.0 | 50.0 | 0.0 | 0.0 |
| DEX0477_027.nt.4 | 2441.0 | 31.6 | 31.6 | 42.9 | 42.9 | 0.0 | 0.0 |
| DEX0477_027.nt.4 | 5236.0 | 36.8 | 36.8 | 50.0 | 50.0 | 0.0 | 0.0 |
| DEX0477_027.nt.5 | 2441.0 | 31.6 | 31.6 | 42.9 | 42.9 | 0.0 | 0.0 |
| DEX0477_027.nt.5 | 5236.0 | 36.8 | 36.8 | 50.0 | 50.0 | 0.0 | 0.0 |
| DEX0477_027.nt.6 | 2441.0 | 31.6 | 31.6 | 42.9 | 42.9 | 0.0 | 0.0 |
| DEX0477_027.nt.6 | 5236.0 | 36.8 | 36.8 | 50.0 | 50.0 | 0.0 | 0.0 |
| DEX0477_027.nt.7 | 2441.0 | 31.6 | 31.6 | 42.9 | 42.9 | 0.0 | 0.0 |
| DEX0477_027.nt.7 | 5236.0 | 36.8 | 36.8 | 50.0 | 50.0 | 0.0 | 0.0 |
| DEX0477_030.nt.1 | 28117.0 | 68.4 | 81.2 | 71.4 | 83.3 | 60.0 | 75.0 |
| DEX0477_030.nt.1 | 28117.1 | 63.2 | 85.7 | 64.3 | 90.0 | 60.0 | 75.0 |
| DEX0477_030.nt.1 | 28118.0 | 47.4 | 81.8 | 42.9 | 85.7 | 60.0 | 75.0 |
| DEX0477_030.nt.1 | 28118.1 | 42.1 | 88.9 | 50.0 | 100.0 | 20.0 | 50.0 |
| DEX0477_030.nt.2 | 28117.0 | 68.4 | 81.2 | 71.4 | 83.3 | 60.0 | 75.0 |
| DEX0477_030.nt.2 | 28117.1 | 63.2 | 85.7 | 64.3 | 90.0 | 60.0 | 75.0 |
| DEX0477_030.nt.2 | 28118.0 | 47.4 | 81.8 | 42.9 | 85.7 | 60.0 | 75.0 |
| DEX0477_030.nt.2 | 28118.1 | 42.1 | 88.9 | 50.0 | 100.0 | 20.0 | 50.0 |
| DEX0477_030.nt.3 | 28117.0 | 68.4 | 81.2 | 71.4 | 83.3 | 60.0 | 75.0 |
| DEX0477_030.nt.3 | 28117.1 | 63.2 | 85.7 | 64.3 | 90.0 | 60.0 | 75.0 |
| DEX0477_030.nt.3 | 28118.0 | 47.4 | 81.8 | 42.9 | 85.7 | 60.0 | 75.0 |
| DEX0477_030.nt.3 | 28118.1 | 42.1 | 88.9 | 50.0 | 100.0 | 20.0 | 50.0 |
| DEX0477_031.nt.1 | 23480.0 | 21.1 | 21.1 | 28.6 | 28.6 | 0.0 | 0.0 |
| DEX0477_031.nt.1 | 23480.1 | 21.1 | 21.1 | 28.6 | 28.6 | 0.0 | 0.0 |
| DEX0477_031.nt.1 | 23481.0 | 26.3 | 27.8 | 35.7 | 35.7 | 0.0 | 0.0 |
| DEX0477_031.nt.1 | 23481.1 | 26.3 | 26.3 | 35.7 | 35.7 | 0.0 | 0.0 |
| DEX0477_031.nt.1 | 38627.0 | 15.8 | 15.8 | 21.4 | 21.4 | 0.0 | 0.0 |
| DEX0477_031.nt.1 | 38627.1 | 15.8 | 15.8 | 21.4 | 21.4 | 0.0 | 0.0 |
| DEX0477_031.nt.1 | 38628.0 | 21.1 | 21.1 | 28.6 | 28.6 | 0.0 | 0.0 |
| DEX0477_031.nt.1 | 38628.1 | 31.6 | 31.6 | 42.9 | 42.9 | 0.0 | 0.0 |
| DEX0477_033.nt.1 | 19534.0 | 21.1 | 44.4 | 7.1 | 16.7 | 60.0 | 100.0 |
| DEX0477_033.nt.1 | 19534.1 | 21.1 | 33.3 | 7.1 | 11.1 | 60.0 | 100.0 |
| DEX0477_033.nt.1 | 19535.0 | 21.1 | 57.1 | 14.3 | 40.0 | 40.0 | 100.0 |
| DEX0477_033.nt.1 | 19535.1 | 21.1 | 80.0 | 14.3 | 66.7 | 40.0 | 100.0 |
| DEX0477_033.nt.1 | 41957.0 | 10.5 | 22.2 | 0.0 | 0.0 | 40.0 | 100.0 |
| DEX0477_033.nt.1 | 41957.1 | 15.8 | 27.3 | 7.1 | 11.1 | 40.0 | 100.0 |
| DEX0477_033.nt.1 | 41957.2 | 21.1 | 50.0 | 7.1 | 20.0 | 60.0 | 100.0 |
| DEX0477_033.nt.1 | 41958.0 | 15.8 | 30.0 | 7.1 | 12.5 | 40.0 | 100.0 |
| DEX0477_033.nt.1 | 41958.1 | 15.8 | 30.0 | 7.1 | 12.5 | 40.0 | 100.0 |
| DEX0477_033.nt.1 | 41958.2 | 15.8 | 33.3 | 0.0 | 0.0 | 60.0 | 100.0 |
| DEX0477_033.nt.2 | 19534.0 | 21.1 | 44.4 | 7.1 | 16.7 | 60.0 | 100.0 |
| DEX0477_033.nt.2 | 19534.1 | 21.1 | 33.3 | 7.1 | 11.1 | 60.0 | 100.0 |
| DEX0477_033.nt.2 | 19535.0 | 21.1 | 57.1 | 14.3 | 40.0 | 40.0 | 100.0 |
| DEX0477_033.nt.2 | 19535.1 | 21.1 | 80.0 | 14.3 | 66.7 | 40.0 | 100.0 |
| DEX0477_033.nt.2 | 41957.0 | 10.5 | 22.2 | 0.0 | 0.0 | 40.0 | 100.0 |
| DEX0477_033.nt.2 | 41957.1 | 15.8 | 27.3 | 7.1 | 11.1 | 40.0 | 100.0 |
| DEX0477_033.nt.2 | 41957.2 | 21.1 | 50.0 | 7.1 | 20.0 | 60.0 | 100.0 |
| DEX0477_033.nt.2 | 41958.0 | 15.8 | 30.0 | 7.1 | 12.5 | 40.0 | 100.0 |
| DEX0477_033.nt.2 | 41958.1 | 15.8 | 30.0 | 7.1 | 12.5 | 40.0 | 100.0 |
| DEX0477_033.nt.2 | 41958.2 | 15.8 | 33.3 | 0.0 | 0.0 | 60.0 | 100.0 |
| DEX0477_033.nt.3 | 19534.0 | 21.1 | 44.4 | 7.1 | 16.7 | 60.0 | 100.0 |
| DEX0477_033.nt.3 | 19534.1 | 21.1 | 33.3 | 7.1 | 11.1 | 60.0 | 100.0 |
| DEX0477_033.nt.3 | 19535.0 | 21.1 | 57.1 | 14.3 | 40.0 | 40.0 | 100.0 |
| DEX0477_033.nt.3 | 19535.1 | 21.1 | 80.0 | 14.3 | 66.7 | 40.0 | 100.0 |
| DEX0477_033.nt.3 | 41957.0 | 10.5 | 22.2 | 0.0 | 0.0 | 40.0 | 100.0 |
| DEX0477_033.nt.3 | 41957.1 | 15.8 | 27.3 | 7.1 | 11.1 | 40.0 | 100.0 |
| DEX0477_033.nt.3 | 41957.2 | 21.1 | 50.0 | 7.1 | 20.0 | 60.0 | 100.0 |
| DEX0477_033.nt.3 | 41958.0 | 15.8 | 30.0 | 7.1 | 12.5 | 40.0 | 100.0 |
| DEX0477_033.nt.3 | 41958.1 | 15.8 | 30.0 | 7.1 | 12.5 | 40.0 | 100.0 |
| DEX0477_033.nt.3 | 41958.2 | 15.8 | 33.3 | 0.0 | 0.0 | 60.0 | 100.0 |
| DEX0477_034.nt.1 | 3933.0 | 5.3 | 12.5 | 7.1 | 14.3 | 0.0 | 0.0 |
| DEX0477_035.nt.1 | 973.0 | 31.6 | 31.6 | 42.9 | 42.9 | 0.0 | 0.0 |
| DEX0477_035.nt.1 | 996.0 | 52.6 | 52.6 | 64.3 | 64.3 | 20.0 | 20.0 |
| DEX0477_035.nt.2 | 973.0 | 31.6 | 31.6 | 42.9 | 42.9 | 0.0 | 0.0 |
| DEX0477_035.nt.3 | 973.0 | 31.6 | 31.6 | 42.9 | 42.9 | 0.0 | 0.0 |
| DEX0477_035.nt.4 | 973.0 | 31.6 | 31.6 | 42.9 | 42.9 | 0.0 | 0.0 |
| DEX0477_035.nt.4 | 996.0 | 52.6 | 52.6 | 64.3 | 64.3 | 20.0 | 20.0 |
| DEX0477_035.nt.5 | 996.0 | 52.6 | 52.6 | 64.3 | 64.3 | 20.0 | 20.0 |
| DEX0477_036.nt.1 | 2371.0 | 47.4 | 75.0 | 50.0 | 77.8 | 40.0 | 66.7 |
| DEX0477_036.nt.1 | 2406.0 | 31.6 | 50.0 | 35.7 | 55.6 | 20.0 | 33.3 |
| DEX0477_036.nt.1 | 2442.0 | 52.6 | 62.5 | 57.1 | 61.5 | 40.0 | 66.7 |
| DEX0477_036.nt.1 | 3111.0 | 68.4 | 86.7 | 64.3 | 81.8 | 80.0 | 100.0 |
| DEX0477_039.nt.1 | 23480.0 | 21.1 | 21.1 | 28.6 | 28.6 | 0.0 | 0.0 |
| DEX0477_039.nt.1 | 23480.1 | 21.1 | 21.1 | 28.6 | 28.6 | 0.0 | 0.0 |
| DEX0477_039.nt.1 | 23481.0 | 26.3 | 27.8 | 35.7 | 35.7 | 0.0 | 0.0 |
| DEX0477_039.nt.1 | 23481.1 | 26.3 | 26.3 | 35.7 | 35.7 | 0.0 | 0.0 |
| DEX0477_039.nt.1 | 38627.0 | 15.8 | 15.8 | 21.4 | 21.4 | 0.0 | 0.0 |
| DEX0477_039.nt.1 | 38627.1 | 15.8 | 15.8 | 21.4 | 21.4 | 0.0 | 0.0 |
| DEX0477_039.nt.1 | 38628.0 | 21.1 | 21.1 | 28.6 | 28.6 | 0.0 | 0.0 |
| DEX0477_039.nt.1 | 38628.1 | 31.6 | 31.6 | 42.9 | 42.9 | 0.0 | 0.0 |
| DEX0477_042.nt.1 | 3383.0 | 78.9 | 78.9 | 92.9 | 92.9 | 40.0 | 40.0 |
| DEX0477_044.nt.1 | 36481.0 | 57.9 | 84.6 | 50.0 | 77.8 | 80.0 | 100.0 |
| DEX0477_044.nt.1 | 36481.1 | 57.9 | 84.6 | 42.9 | 75.0 | 100.0 | 100.0 |
| DEX0477_044.nt.1 | 36482.0 | 26.3 | 45.5 | 21.4 | 37.5 | 40.0 | 66.7 |
| DEX0477_044.nt.1 | 36482.1 | 31.6 | 60.0 | 28.6 | 57.1 | 40.0 | 66.7 |
| DEX0477_044.nt.2 | 36481.0 | 57.9 | 84.6 | 50.0 | 77.8 | 80.0 | 100.0 |
| DEX0477_044.nt.2 | 36481.1 | 57.9 | 84.6 | 42.9 | 75.0 | 100.0 | 100.0 |
| DEX0477_044.nt.2 | 36482.0 | 26.3 | 45.5 | 21.4 | 37.5 | 40.0 | 66.7 |
| DEX0477_044.nt.2 | 36482.1 | 31.6 | 60.0 | 28.6 | 57.1 | 40.0 | 66.7 |
| DEX0477_044.nt.3 | 36481.0 | 57.9 | 84.6 | 50.0 | 77.8 | 80.0 | 100.0 |
| DEX0477_044.nt.3 | 36481.1 | 57.9 | 84.6 | 42.9 | 75.0 | 100.0 | 100.0 |
| DEX0477_044.nt.3 | 36482.0 | 26.3 | 45.5 | 21.4 | 37.5 | 40.0 | 66.7 |
| DEX0477_044.nt.3 | 36482.1 | 31.6 | 60.0 | 28.6 | 57.1 | 40.0 | 66.7 |
| DEX0477_046.nt.1 | 1551.0 | 42.1 | 57.1 | 50.0 | 63.6 | 20.0 | 33.3 |
| DEX0477_047.nt.1 | 452.0 | 15.8 | 37.5 | 21.4 | 42.9 | 0.0 | 0.0 |
| DEX0477_048.nt.1 | 33514.0 | 15.8 | 100.0 | 14.3 | 100.0 | 20.0 | 100.0 |
| DEX0477_048.nt.1 | 33514.1 | 15.8 | 100.0 | 14.3 | 100.0 | 20.0 | 100.0 |
| DEX0477_048.nt.1 | 33515.0 | 31.6 | 54.5 | 21.4 | 37.5 | 60.0 | 100.0 |
| DEX0477_048.nt.1 | 33515.1 | 36.8 | 58.3 | 28.6 | 44.4 | 60.0 | 100.0 |
| DEX0477_048.nt.2 | 33514.0 | 15.8 | 100.0 | 14.3 | 100.0 | 20.0 | 100.0 |
| DEX0477_048.nt.2 | 33514.1 | 15.8 | 100.0 | 14.3 | 100.0 | 20.0 | 100.0 |
| DEX0477_048.nt.2 | 33515.0 | 31.6 | 54.5 | 21.4 | 37.5 | 60.0 | 100.0 |
| DEX0477_048.nt.2 | 33515.1 | 36.8 | 58.3 | 28.6 | 44.4 | 60.0 | 100.0 |
| DEX0477_048.nt.3 | 33514.0 | 15.8 | 100.0 | 14.3 | 100.0 | 20.0 | 100.0 |
| DEX0477_048.nt.3 | 33514.1 | 15.8 | 100.0 | 14.3 | 100.0 | 20.0 | 100.0 |
| DEX0477_048.nt.3 | 33515.0 | 31.6 | 54.5 | 21.4 | 37.5 | 60.0 | 100.0 |
| DEX0477_048.nt.3 | 33515.1 | 36.8 | 58.3 | 28.6 | 44.4 | 60.0 | 100.0 |
| DEX0477_048.nt.4 | 33514.0 | 15.8 | 100.0 | 14.3 | 100.0 | 20.0 | 100.0 |
| DEX0477_048.nt.4 | 33514.1 | 15.8 | 100.0 | 14.3 | 100.0 | 20.0 | 100.0 |
| DEX0477_048.nt.4 | 33515.0 | 31.6 | 54.5 | 21.4 | 37.5 | 60.0 | 100.0 |
| DEX0477_048.nt.4 | 33515.1 | 36.8 | 58.3 | 28.6 | 44.4 | 60.0 | 100.0 |
| DEX0477_051.nt.1 | 3081.0 | 57.9 | 57.9 | 50.0 | 50.0 | 80.0 | 80.0 |
| DEX0477_052.nt.1 | 10766.0 | 31.6 | 100.0 | 21.4 | 100.0 | 60.0 | 100.0 |
| DEX0477_052.nt.1 | 10766.1 | 36.8 | 100.0 | 35.7 | 100.0 | 40.0 | 100.0 |
| DEX0477_052.nt.1 | 10767.0 | 42.1 | 100.0 | 35.7 | 100.0 | 60.0 | 100.0 |
| DEX0477_052.nt.1 | 10767.1 | 36.8 | 87.5 | 35.7 | 83.3 | 40.0 | 100.0 |
| DEX0477_054.nt.1 | 9340.0 | 57.9 | 57.9 | 64.3 | 64.3 | 40.0 | 40.0 |
| DEX0477_054.nt.1 | 9340.1 | 57.9 | 57.9 | 71.4 | 71.4 | 20.0 | 20.0 |
| DEX0477_054.nt.2 | 9341.0 | 26.3 | 26.3 | 35.7 | 35.7 | 0.0 | 0.0 |
| DEX0477_054.nt.2 | 9341.1 | 31.6 | 31.6 | 42.9 | 42.9 | 0.0 | 0.0 |
| DEX0477_070.nt.1 | 3745.0 | 42.1 | 44.4 | 50.0 | 53.8 | 20.0 | 20.0 |

[0598] Prostate Cancer

[0599] For prostate cancer three different chip designs were evaluated Keith overlapping sets of a total of 29 samples, comparing the expression patterns of prostate cancer or benign disease derived total RNA to total RNA isolated from a pool of 35 normal prostate tissues. For the Prostate1 Array and Prostate2 Array Chips all 29 samples (17 prostate cancer samples, 12 non-malignant disease samples) were analyzed. For the Multi-Cancer Array Chip a subset of 28 of these samples (16 prostate cancer samples, 12 non-malignant disease samples) were analyzed.

[0600] The results for the statistically significant up-regulated genes on the Prostate1 Array Chip and the Prostate2 Array Chip are shown in Table(s) 22. The results for the statistically significant up-regulated genes on the Multi-Cancer Array Chip are shown in Table(s) 23. The first two columns of each table contain information about the sequence itself (DEX ID, Oligo Name), the next columns show the results obtained for prostate cancer samples (“CAN”) or non-malignant disease samples (“DIS”). ‘% up’ indicates the percentage of all experiments in which up-regulation of at least 2-fold was observed (n=29 for the Prostate2 Array Chip and the Multi-Cancer Array Chip), ‘% valid up’ indicates the percentage of experiments with valid expression values in which up-regulation of at least 2-fold was observed. Additional experiments were performed, generally the results are only reported below if the data showed 30% or greater up-regulation in at least one of the experimental subsets.

TABLE 22

| | | | Pro1 | | Pro1 | | Pro2 | | Pro2 |
|---|---|---|---|---|---|---|---|---|---|
| | | Pro1 | CAN % | Pro1 | DIS % | Pro2 | CAN % | Pro2 | DIS % |
| | | CAN | valid | DIS | valid | CAN | valid | DIS | valid |
| | Oligo | % up | up | % up | up | % up | up | % up | up |
| DEX ID | Name | n = 17 | n = 17 | n = 12 | n = 12 | n = 17 | n = 17 | n = 12 | n = 12 |
| DEX0477_007.nt.1 | 18644.01 | 29.4 | 31.2 | 8.3 | 25 | 29.4 | 35.7 | 8.3 | 16.7 |
| DEX0477_007.nt.1 | 18644.02 | 29.4 | 35.7 | 8.3 | 25 | 29.4 | 35.7 | 8.3 | 16.7 |

[0601] TABLE 23

| | | | Pro Multi- | | Pro Multi- |
|---|---|---|---|---|---|
| | | Pro Multi- | Can CAN | Pro Multi- | Can DIS |
| | Oligo | Can CAN % up | % valid up | Can DIS % up | % valid up |
| DEX ID | Name | n = 17 | n = 17 | n = 12 | n = 12 |
| DEX0477_001.nt.1 | 78855.0 | 35.3 | 40.0 | 8.3 | 8.3 |
| DEX0477_001.nt.1 | 78855.1 | 29.4 | 33.3 | 8.3 | 8.3 |
| DEX0477_001.nt.1 | 78856.0 | 29.4 | 33.3 | 8.3 | 8.3 |
| DEX0477_001.nt.1 | 78856.1 | 35.3 | 40.0 | 8.3 | 8.3 |
| DEX0477_001.nt.2 | 27921.0 | 35.3 | 37.5 | 8.3 | 8.3 |
| DEX0477_001.nt.2 | 27921.1 | 35.3 | 37.5 | 8.3 | 8.3 |
| DEX0477_001.nt.2 | 27922.0 | 29.4 | [symbol] 1.2 | 8.3 | 8.3 |
| DEX0477_001.nt.2 | 27922.1 | 35.3 | 37.5 | 8.3 | 8.3 |
| DEX0477_001.nt.2 | 78855.0 | 35.3 | 40.0 | 8.3 | [symbol] |
| DEX0477_001.nt.2 | 78855.1 | 29.4 | 33.3 | 8.3 | 8.3 |
| DEX0477_001.nt.2 | 78856.0 | 29.4 | 33.3 | 8.3 | 8.3 |
| DEX0477_001.nt.2 | 78856.1 | 35.3 | 40.0 | 8.3 | 8.3 |
| DEX0477_001.nt.4 | 27921.0 | 35.3 | 37.5 | 8.3 | 8.3 |
| DEX0477_001.nt.4 | 27921.1 | 35.3 | 37.5 | 8.3 | 8.3 |
| DEX0477_001.nt.4 | 27922.0 | 29.4 | 31.2 | 8.3 | 8.3 |
| DEX0477_001.nt.4 | 27922.1 | 35.3 | 37.5 | 8.3 | 8.3 |
| DEX0477_001.nt.4 | 78855.0 | 35.3 | 40.0 | 8.3 | 8.3 |
| DEX0477_001.nt.4 | 78855.1 | 29.4 | 33.3 | 8.3 | 8.3 |
| DEX0477_001.nt.4 | 78856.0 | 29.4 | 33.3 | 8.3 | 8.3 |
| DEX0477_001.nt.4 | 78856.1 | 35.3 | 40.0 | 8.3 | 8.3 |
| DEX0477_001.nt.5 | 27921.0 | 35.3 | 37.5 | 8.3 | 8.3 |
| DEX0477_001.nt.5 | 27921.1 | 35.3 | 37.5 | 8.3 | 8.3 |
| DEX0477_001.nt.5 | 27922.0 | 29.4 | 31.2 | 8.3 | 8.3 |
| DEX0477_001.nt.5 | 27922.1 | 35.3 | 37.5 | 8.3 | 8.3 |
| DEX0477_001.nt.5 | 78855.0 | 35.3 | 40.0 | 8.3 | 8.3 |
| DEX0477_001.nt.5 | 78855.1 | 29.4 | 33.3 | 8.3 | 8.3 |
| DEX0477_001.nt.5 | 78856.0 | 29.4 | 33.3 | 8.3 | 8.3 |
| DEX0477_001.nt.5 | 78856.1 | 35.3 | 40.0 | 8.3 | 8.3 |
| DEX0477_001.nt.6 | 27921.0 | 35.3 | 37.5 | 8.3 | 8.3 |
| DEX0477_001.nt.6 | 27921.1 | 35.3 | 37.5 | 8.3 | 8.3 |
| DEX0477_001.nt.6 | 27922.0 | 29.4 | 31.2 | 8.3 | 8.3 |
| DEX0477_001.nt.6 | 27922.1 | 35.3 | 37.5 | 8.3 | 8.3 |
| DEX0477_001.nt.6 | 78855.0 | 35.3 | 40.0 | 8.3 | 8.3 |
| DEX0477_001.nt.6 | 78855.1 | 29.4 | 33.3 | 8.3 | 8.3 |
| DEX0477_001.nt.6 | 78856.0 | 29.4 | 33.3 | 8.3 | 8.3 |
| DEX0477_001.nt.6 | 78856.1 | 35.3 | 40.0 | 8.3 | 8.3 |
| DEX0477_001.nt.7 | 27921.0 | 35.3 | 37.5 | 8.3 | 8.3 |
| DEX0477_001.nt.7 | 27921.1 | 35.3 | 37.5 | 8.3 | 8.3 |
| DEX0477_001.nt.7 | 78855.0 | 35.3 | 40.0 | 8.3 | 8.3 |
| DEX0477_001.nt.7 | 78855.1 | 29.4 | 33.3 | 8.3 | 8.3 |
| DEX0477_001.nt.7 | 78856.0 | 29.4 | 33.3 | 8.3 | 8.3 |
| DEX0477_001.nt.7 | 78856.1 | 35.3 | 40.0 | 8.3 | 8.3 |
| DEX0477_001.nt.8 | 27921.0 | 35.3 | 37.5 | 8.3 | 8.3 |
| DEX0477_001.nt.8 | 27921.1 | 35.3 | 37.5 | 8.3 | 8.3 |
| DEX0477_001.nt.8 | 27922.0 | 29.4 | 31.2 | 8.3 | 8.3 |
| DEX0477_001.nt.8 | 27922.1 | 35.3 | 37.5 | 8.3 | 8.3 |
| DEX0477_001.nt.8 | 78855.0 | 35.3 | 40.0 | 8.3 | 8.3 |
| DEX0477_001.nt.8 | 78855.1 | 29.4 | 33.3 | 8.3 | 8.3 |
| DEX0477_001.nt.8 | 78856.0 | 29.4 | 33.3 | 8.3 | 8.3 |
| DEX0477_001.nt.8 | 78856.1 | 35.3 | 40.0 | 8.3 | 8.3 |
| DEX0477_001.nt.9 | 27921.0 | 35.3 | 37.5 | 8.3 | 8.3 |
| DEX0477_001.nt.9 | 27921.1 | 35.3 | 37.5 | 8.3 | 8.3 |
| DEX0477_001.nt.9 | 27922.0 | 29.4 | 31.2 | 8.3 | 8.3 |
| DEX0477_001.nt.9 | 27922.1 | 35.3 | 37.5 | 8.3 | 8.3 |
| DEX0477_001.nt.9 | 78855.0 | 35.3 | 40.0 | 8.3 | 8.3 |
| DEX0477_001.nt.9 | 78855.1 | 29.4 | 33.3 | 8.3 | 8.3 |
| DEX0477_001.nt.9 | 78856.0 | 29.4 | 33.3 | 8.3 | 8.3 |
| DEX0477_001.nt.9 | 78856.1 | 35.3 | 40.0 | 8.3 | 8.3 |
| DEX0477_001.nt.1 | 27921.0 | 35.3 | 37.5 | 8.3 | 8.3 |
| DEX0477_001.nt.1 | 27921.1 | 35.3 | 37.5 | 8.3 | 8.3 |
| DEX0477_002.nt.1 | 27922.0 | 29.4 | 31.2 | 8.3 | 8.3 |
| DEX0477_002.nt.1 | 27922.1 | 35.3 | 37.5 | 8.3 | 8.3 |
| DEX0477_002.nt.1 | 78855.0 | 35.3 | 40.0 | 8.3 | 8.3 |
| DEX0477_002.nt.1 | 78855.1 | 29.4 | 33.3 | 8.3 | 8.3 |
| DEX0477_002.nt.1 | 78856.0 | 29.4 | 33.3 | 8.3 | 8.3 |
| DEX0477_002.nt.1 | 78856.1 | 35.3 | 40.0 | 8.3 | 8.3 |
| DEX0477_002.nt.2 | 27921.0 | 35.3 | 37.5 | 8.3 | 8.3 |
| DEX0477_002.nt.2 | 27921.1 | 35.3 | 37.5 | 8.3 | 8.3 |
| DEX0477_002.nt.2 | 27922.0 | 29.4 | 31.2 | 8.3 | 8.3 |
| DEX0477_002.nt.2 | 27922.1 | 35.3 | 37.5 | 8.3 | 8.3 |
| DEX0477_002.nt.2 | 78855.0 | 35.3 | 40.0 | 8.3 | 8.3 |
| DEX0477_002.nt.2 | 78855.1 | 29.4 | 33.3 | 8.3 | 8.3 |
| DEX0477_002.nt.2 | 78856.0 | 29.4 | 33.3 | 8.3 | 8.3 |
| DEX0477_002.nt.2 | 78856.1 | 35.3 | 40.0 | 8.3 | 8.3 |
| DEX0477_015.nt.1 | 2085.0 | 29.4 | 31.2 | 16.7 | 16.7 |
| DEX0477_015.nt.1 | 4909.0 | 29.4 | 31.2 | 16.7 | 16.7 |
| DEX0477_015.nt.1 | 4909.1 | 29.4 | 31.2 | 16.7 | 16.7 |
| DEX0477_015.nt.1 | 4910.0 | 23.5 | 25.0 | 16.7 | 16.7 |
| DEX0477_015.nt.1 | 4910.1 | 29.4 | 31.2 | 16.7 | 16.7 |
| DEX0477_015.nt.1 | 17292.0 | 29.4 | 31.2 | 16.7 | 16.7 |
| DEX0477_015.nt.1 | 17292.1 | 29.4 | 31.2 | 16.7 | 16.7 |
| DEX0477_015.nt.1 | 17293.0 | 29.4 | 31.2 | 16.7 | 16.7 |
| DEX0477_015.nt.1 | 17293.1 | 29.4 | 31.2 | 16.7 | 16.7 |
| DEX0477_015.nt.1 | 24404.0 | 29.4 | 31.2 | 16.7 | 16.7 |
| DEX0477_015.nt.1 | 24404.1 | 29.4 | 31.2 | 16.7 | 16.7 |
| DEX0477_015.nt.1 | 24405.0 | 29.4 | 38.5 | 16.7 | 20.0 |
| DEX0477_015.nt.1 | 24405.1 | 29.4 | 31.2 | 16.7 | 16.7 |
| DEX0477_015.nt.2 | 2085.0 | 29.4 | 31.2 | 16.7 | 16.7 |
| DEX0477_015.nt.2 | 4909.0 | 29.4 | 31.2 | 16.7 | 16.7 |
| DEX0477_015.nt.2 | 4909.1 | 29.4 | 31.2 | 16.7 | 16.7 |
| DEX0477_015.nt.2 | 4910.0 | 23.5 | 25.0 | 16.7 | 16.7 |
| DEX0477_015.nt.2 | 4910.1 | 29.4 | 31.2 | 16.7 | 16.7 |
| DEX0477_015.nt.2 | 17292.0 | 29.4 | 31.2 | 16.7 | 16.7 |
| DEX0477_015.nt.2 | 17292.1 | 29.4 | 31.2 | 16.7 | 16.7 |
| DEX0477_015.nt.2 | 17293.0 | 29.4 | 31.2 | 16.7 | 16.7 |
| DEX0477_015.nt.2 | 17293.1 | 29.4 | 31.2 | 16.7 | 16.7 |
| DEX0477_015.nt.2 | 24404.0 | 29.4 | 31.2 | 16.7 | 16.7 |
| DEX0477_015.nt.2 | 24404.1 | 29.4 | 31.2 | 16.7 | 16.7 |
| DEX0477_015.nt.2 | 24405.0 | 29.4 | 38.5 | 16.7 | 20.0 |
| DEX0477_015.nt.2 | 24405.1 | 29.4 | 31.2 | 16.7 | 16.7 |
| DEX0477_019.nt.1 | 41937.2 | 0.0 | 0.0 | 8.3 | 50.0 |
| DEX0477_020.nt.1 | 41937.2 | 0.0 | 0.0 | 8.3 | 50.0 |
| DEX0477_020.nt.1 | 78627.1 | 0.0 | 0.0 | 8.3 | 50.0 |
| DEX0477_020.nt.2 | 41937.2 | 0.0 | 0.0 | 8.3 | 50.0 |
| DEX0477_020.nt.2 | 78627.1 | 0.0 | 0.0 | 8.3 | 50.0 |
| DEX0477_021.nt.1 | 33088.0 | 29.4 | 31.2 | 8.3 | 8.3 |
| DEX0477_021.nt.1 | 33088.1 | 23.5 | 25.0 | 8.3 | 9.1 |
| DEX0477_021.nt.1 | 33088.2 | 29.4 | 33.3 | 8.3 | 8.3 |
| DEX0477_021.nt.1 | 33088.3 | 29.4 | 31.2 | 8.3 | 8.3 |
| DEX0477_021.nt.1 | 33089.0 | 11.8 | 12.5 | 8.3 | 8.3 |
| DEX0477_021.nt.1 | 33089.1 | 17.6 | 18.8 | 8.3 | 8.3 |
| DEX0477_021.nt.1 | 33089.2 | 17.6 | 50.0 | 0.0 | 0.0 |
| DEX0477_021.nt.2 | 33088.0 | 29.4 | 31.2 | 8.3 | 8.3 |
| DEX0477_021.nt.2 | 33088.1 | 23.5 | 25.0 | 8.3 | 9.1 |
| DEX0477_021.nt.2 | 33088.2 | 29.4 | 33.3 | 8.3 | 8.3 |
| DEX0477_021.nt.2 | 33088.3 | 29.4 | 31.2 | 8.3 | 8.3 |
| DEX0477_021.nt.2 | 33089.0 | 11.8 | 12.5 | 8.3 | 8.3 |
| DEX0477_021.nt.2 | 33089.1 | 17.6 | 18.8 | 8.3 | 8.3 |
| DEX0477_021.nt.2 | 33089.2 | 17.6 | 50.0 | 0.0 | 0.0 |
| DEX0477_022.nt.1 | 41937.2 | 0.0 | 0.0 | 8.3 | 50.0 |
| DEX0477_023.nt.1 | 33088.0 | 29.4 | 31.2 | 8.3 | 8.3 |
| DEX0477_023.nt.1 | 33088.1 | 23.5 | 25.0 | 8.3 | 9.1 |
| DEX0477_023.nt.1 | 33088.2 | 29.4 | 33.3 | 8.3 | 8.3 |
| DEX0477_023.nt.1 | 33088.3 | 29.4 | 31.2 | 8.3 | 8.3 |

SEQ ID NO: 1-141 was up-regulated on various tissue microarrays. Accordingly, nucleotide SEQ ID NO: 1-141 or the encoded protein SEQ ID NO: 142-361 may be used as a cancer therapeutic and/or diagnostic target for the tissues in which expression is shown.

[0602] The following table lists a portion of the transcripts (DEX ID) of the present invention which showed upregulataion of at least 2-fold in at least 2 different cancer tissues. For transcripts with a “1” at least a 2-fold upregulation was detected in the cancer tissue (ovary, breast, colon, lung, and prostate) in the respective column. A “0” indicates a 2-fold upregulation was not detected in that tissue for the transcript. This table demonstrates a general distribution of cancer tissues expression for a portion of the transcripts of the present invention.

| DEX ID | Ovary | Breast | Colon | Lung | Prostate |
|---|---|---|---|---|---|
| DEX0477_003.nt.1 | 1 | 1 | 1 | 0 | 0 |
| DEX0477_003.nt.2 | 1 | 1 | 1 | 0 | 0 |
| DEX0477_004.nt.1 | 1 | 1 | 1 | 1 | 0 |
| DEX0477_005.nt.1 | 1 | 1 | 1 | 0 | 0 |
| DEX0477_006.nt.1 | 1 | 1 | 1 | 0 | 0 |
| DEX0477_007.nt.1 | 1 | 1 | 1 | 0 | 1 |
| DEX0477_008.nt.1 | 1 | 1 | 1 | 1 | 0 |
| DEX0477_009.nt.1 | 1 | 1 | 1 | 1 | 0 |
| DEX0477_010.nt.1 | 1 | 1 | 1 | 0 | 0 |
| DEX0477_011.nt.1 | 1 | 1 | 0 | 0 | 0 |
| DEX0477_012.nt.1 | 1 | 1 | 0 | 0 | 0 |
| DEX0477_013.nt.1 | 1 | 1 | 0 | 0 | 0 |
| DEX0477_014.nt.1 | 1 | 1 | 0 | 0 | 0 |
| DEX0477_014.nt.2 | 1 | 1 | 0 | 0 | 0 |
| DEX0477_014.nt.3 | 1 | 1 | 0 | 0 | 0 |
| DEX0477_015.nt.1 | 1 | 1 | 0 | 0 | 1 |
| DEX0477_015.nt.2 | 1 | 1 | 0 | 0 | 1 |
| DEX0477_016.nt.1 | 1 | 1 | 0 | 1 | 0 |
| DEX0477_016.nt.2 | 1 | 1 | 0 | 1 | 0 |
| DEX0477_016.nt.4 | 1 | 1 | 0 | 1 | 0 |
| DEX0477_016.nt.5 | 1 | 1 | 0 | 1 | 0 |
| DEX0477_018.nt.1 | 1 | 1 | 0 | 0 | 0 |
| DEX0477_019.nt.1 | 1 | 1 | 0 | 1 | 0 |
| DEX0477_021.nt.1 | 1 | 1 | 0 | 1 | 1 |
| DEX0477_021.nt.2 | 1 | 1 | 0 | 1 | 1 |
| DEX0477_022.nt.1 | 1 | 1 | 0 | 1 | 0 |
| DEX0477_023.nt.1 | 1 | 1 | 0 | 1 | 1 |
| DEX0477_024.nt.1 | 1 | 1 | 0 | 1 | 0 |
| DEX0477_024.nt.2 | 1 | 1 | 0 | 1 | 0 |
| DEX0477_024.nt.3 | 1 | 1 | 0 | 1 | 0 |
| DEX0477_024.nt.4 | 1 | 1 | 0 | 1 | 0 |
| DEX0477_025.nt.1 | 1 | 1 | 0 | 1 | 0 |
| DEX0477_026.nt.1 | 1 | 1 | 0 | 0 | 0 |
| DEX0477_027.nt.1 | 1 | 1 | 0 | 0 | 0 |
| DEX0477_027.nt.2 | 1 | 1 | 0 | 0 | 0 |
| DEX0477_027.nt.3 | 1 | 1 | 0 | 0 | 0 |
| DEX0477_027.nt.4 | 1 | 1 | 0 | 0 | 0 |
| DEX0477_027.nt.5 | 1 | 1 | 0 | 0 | 0 |
| DEX0477_027.nt.6 | 1 | 1 | 0 | 0 | 0 |
| DEX0477_027.nt.7 | 1 | 1 | 0 | 0 | 0 |
| DEX0477_028.nt.1 | 1 | 1 | 0 | 0 | 0 |
| DEX0477_028.nt.2 | 1 | 1 | 0 | 0 | 0 |
| DEX0477_028.nt.3 | 1 | 1 | 0 | 0 | 0 |
| DEX0477_028.nt.4 | 1 | 1 | 0 | 0 | 0 |
| DEX0477_030.nt.1 | 1 | 0 | 1 | 0 | 0 |
| DEX0477_030.nt.2 | 1 | 0 | 1 | 0 | 0 |
| DEX0477_030.nt.3 | 1 | 0 | 1 | 0 | 0 |
| DEX0477_031.nt.1 | 1 | 0 | 1 | 0 | 1 |
| DEX0477_032.nt.1 | 1 | 0 | 1 | 0 | 0 |
| DEX0477_033.nt.1 | 1 | 0 | 1 | 1 | 0 |
| DEX0477_033.nt.2 | 1 | 0 | 1 | 1 | 0 |
| DEX0477_033.nt.3 | 1 | 0 | 1 | 1 | 0 |
| DEX0477_034.nt.1 | 1 | 0 | 1 | 0 | 0 |
| DEX0477_035.nt.1 | 1 | 0 | 1 | 0 | 0 |
| DEX0477_035.nt.2 | 1 | 0 | 1 | 0 | 0 |
| DEX0477_035.nt.3 | 1 | 0 | 1 | 0 | 0 |
| DEX0477_035.nt.4 | 1 | 0 | 1 | 0 | 0 |
| DEX0477_035.nt.5 | 1 | 0 | 1 | 0 | 0 |
| DEX0477_036.nt.1 | 1 | 0 | 1 | 1 | 0 |
| DEX0477_037.nt.1 | 1 | 0 | 1 | 0 | 0 |
| DEX0477_038.nt.1 | 1 | 0 | 1 | 1 | 0 |
| DEX0477_038.nt.2 | 1 | 0 | 1 | 1 | 0 |
| DEX0477_038.nt.3 | 1 | 0 | 1 | 1 | 0 |
| DEX0477_039.nt.1 | 1 | 0 | 1 | 0 | 1 |
| DEX0477_040.nt.1 | 1 | 0 | 1 | 1 | 0 |
| DEX0477_040.nt.2 | 1 | 0 | 0 | 1 | 0 |
| DEX0477_041.nt.1 | 1 | 0 | 1 | 0 | 0 |
| DEX0477_042.nt.1 | 1 | 0 | 1 | 1 | 0 |
| DEX0477_043.nt.1 | 1 | 0 | 0 | 1 | 0 |
| DEX0477_044.nt.1 | 1 | 0 | 0 | 0 | 1 |
| DEX0477_044.nt.2 | 1 | 0 | 0 | 0 | 1 |
| DEX0477_044.nt.3 | 1 | 0 | 0 | 0 | 1 |
| DEX0477_046.nt.1 | 1 | 0 | 0 | 1 | 0 |
| DEX0477_047.nt.1 | 1 | 0 | 0 | 1 | 0 |
| DEX0477_048.nt.1 | 1 | 0 | 0 | 0 | 1 |
| DEX0477_048.nt.2 | 1 | 0 | 0 | 0 | 1 |
| DEX0477_048.nt.3 | 1 | 0 | 0 | 0 | 1 |
| DEX0477_048.nt.4 | 1 | 0 | 0 | 0 | 1 |
| DEX0477_050.nt.1 | 1 | 0 | 0 | 1 | 0 |
| DEX0477_051.nt.1 | 1 | 0 | 0 | 1 | 0 |
| DEX0477_052.nt.1 | 1 | 0 | 0 | 1 | 0 |
| DEX0477_053.nt.1 | 1 | 0 | 0 | 1 | 0 |
| DEX0477_054.nt.1 | 1 | 0 | 0 | 1 | 0 |
| DEX0477_054.nt.2 | 1 | 0 | 0 | 1 | 0 |
| DEX0477_055.nt.1 | 1 | 0 | 0 | 1 | 0 |
| DEX0477_055.nt.2 | 1 | 0 | 0 | 1 | 0 |
| DEX0477_055.nt.3 | 1 | 0 | 0 | 1 | 0 |
| DEX0477_055.nt.4 | 1 | 0 | 0 | 1 | 0 |
| DEX0477_056.nt.1 | 1 | 0 | 0 | 1 | 0 |
| DEX0477_057.nt.1 | 1 | 0 | 0 | 1 | 0 |
| DEX0477_058.nt.1 | 0 | 1 | 1 | 0 | 0 |
| DEX0477_058.nt.2 | 0 | 1 | 1 | 0 | 0 |
| DEX0477_059.nt.1 | 0 | 1 | 1 | 0 | 0 |
| DEX0477_059.nt.2 | 0 | 1 | 1 | 0 | 0 |
| DEX0477_060.nt.1 | 0 | 1 | 1 | 0 | 0 |
| DEX0477_060.nt.2 | 0 | 1 | 1 | 0 | 0 |
| DEX0477_061.nt.1 | 0 | 1 | 1 | 0 | 0 |
| DEX0477_061.nt.2 | 0 | 1 | 1 | 0 | 0 |
| DEX0477_062.nt.1 | 0 | 1 | 1 | 0 | 0 |
| DEX0477_063.nt.1 | 0 | 1 | 1 | 0 | 0 |
| DEX0477_063.nt.2 | 0 | 1 | 1 | 0 | 0 |
| DEX0477_064.nt.1 | 0 | 1 | 1 | 0 | 0 |
| DEX0477_065.nt.1 | 0 | 1 | 1 | 0 | 0 |
| DEX0477_065.nt.2 | 0 | 1 | 1 | 0 | 0 |
| DEX0477_065.nt.3 | 0 | 1 | 1 | 0 | 0 |
| DEX0477_067.nt.1 | 0 | 1 | 1 | 1 | 0 |
| DEX0477_068.nt.1 | 0 | 1 | 0 | 1 | 0 |
| DEX0477_069.nt.1 | 0 | 1 | 0 | 1 | 0 |
| DEX0477_070.nt.1 | 0 | 1 | 0 | 1 | 0 |
| DEX0477_071.nt.1 | 0 | 1 | 0 | 1 | 0 |
| DEX0477_071.nt.2 | 0 | 1 | 0 | 1 | 0 |
| DEX0477_072.nt.1 | 0 | 1 | 0 | 1 | 0 |
| DEX0477_072.nt.2 | 0 | 1 | 0 | 1 | 0 |
| DEX0477_073.nt.1 | 0 | 0 | 1 | 1 | 0 |
| DEX0477_073.nt.2 | 0 | 0 | 1 | 1 | 0 |
| DEX0477_075.nt.1 | 0 | 0 | 1 | 1 | 0 |
| DEX0477_001.nt.9 | 0 | 0 | 1 | 0 | 1 |
| DEX0477_002.nt.1 | 0 | 0 | 1 | 0 | 1 |
| DEX0477_002.nt.2 | 0 | 0 | 1 | 0 | 1 |
| DEX0477_076.nt.1 | 0 | 0 | 1 | 1 | 0 |
| DEX0477_077.nt.1 | 0 | 0 | 1 | 1 | 0 |
| DEX0477_078.nt.1 | 0 | 0 | 1 | 1 | 0 |
| DEX0477_079.nt.1 | 0 | 0 | 1 | 1 | 0 |
| Totals | 90 | 67 | 58 | 57 | 18 |

[0603] The following table lists the location (Oligo Location) where the microarray oligos (Oligo ID) map on the transcripts (DEX ID) of the present invention. Each Oligo ID may have been printed multiple times on a single chip as replicates. The Oligo Name is an exemplary replicate (e.g. 1000.01) for the Oligo ID (e.g. 1000), and data from other replicates (e.g. 1000.02, 1000.03) may be reported. Additionally, the Array (Chip Name) that each oligo and oligo replicates were printed on is included.

| DEX NT ID | Oligo ID | Oligo Name | Chip Name | Oligo Location |
|---|---|---|---|---|
| DEX0477_001.nt.1 | 78856 | 78856.0 | Multi-Can array | 1738-1797 |
| DEX0477_001.nt.1 | 24536 | 24536.02 | Prostatel array | 514-573 |
| DEX0477_001.nt.1 | 78855 | 78855.0 | Multi-Can array | 1743-1802 |
| DEX0477_001.nt.2 | 24496 | 24496.02 | Prostatel array | 3144-3203 |
| DEX0477_001.nt.2 | 78856 | 78856.0 | Multi-Can array | 3321-3380 |
| DEX0477_001.nt.2 | 27922 | 27922.0 | Multi-Can array | 3121-3180 |
| DEX0477_001.nt.2 | 24474 | 24474.01 | Prostatel array | 2569- [symbol] 628 |
| DEX0477_001.nt.2 | 24536 | 24536.02 | Prostatel array | 558-617 |
| DEX0477_001.nt.2 | 27921 | 27921.0 | Multi-Can array | 3144-3203 |
| DEX0477_001.nt.2 | 78855 | 78855.0 | Multi-Can array | 3326-3385 |
| DEX0477_001.nt.4 | 24536 | 24536.02 | Prostatel array | 558-617 |
| DEX0477_001.nt.4 | 27922 | 27922.0 | Multi-Can array | 4072-4131 |
| DEX0477_001.nt.4 | 78856 | 78856.0 | Multi-Can array | 4272-4331 |
| DEX0477_001.nt.4 | 24474 | 24474.01 | Prostatel array | 3776-3835 |
| DEX0477_001.nt.4 | 24496 | 24496.02 | Prostatel array | 4095-4154 |
| DEX0477_001.nt.4 | 27921 | 27921.0 | Multi-Can array | 4095-4154 |
| DEX0477_001.nt.5 | 24536 | 24536.02 | Prostatel array | 558-617 |
| DEX0477_001.nt.5 | 27922 | 27922.0 | Multi-Can array | 4141-4200 |
| DEX0477_001.nt.5 | 78855 | 78855.0 | Multi-Can array | 4346-4405 |
| DEX0477_001.nt.5 | 24474 | 24474.01 | Prostatel array | 3776-3835 |
| DEX0477_001.nt.5 | 27921 | 27921.0 | Multi-Can array | 4164-4223 |
| DEX0477_001.nt.5 | 24496 | 24496.02 | Prostatel array | 4164-4223 |
| DEX0477_001.nt.5 | 78856 | 78856.0 | Multi-Can array | 4341-4400 |
| DEX0477_001.nt.6 | 27922 | 27922.0 | Multi-Can array | 4057-4116 |
| DEX0477_001.nt.6 | 78856 | 78856.0 | Multi-Can array | 4257-4316 |
| DEX0477_001.nt.6 | 24496 | 24496.02 | Prostatel array | 4080-4139 |
| DEX0477_001.nt.6 | 24536 | 24536.02 | Prostatel array | 558-617 |
| DEX0477_001.nt.6 | 24474 | 24474.01 | Prostatel array | 3776-3835 |
| DEX0477_001.nt.6 | 27921 | 27921.0 | Multi-Can array | 4080-4139 |
| DEX0477_001.nt.6 | 78855 | 78855.0 | Multi-Can array | 4262-4321 |
| DEX0477_001.nt.7 | 24474 | 24474.01 | Prostatel array | 3776-3835 |
| DEX0477_001.nt.7 | 24536 | 24536.02 | Prostatel array | 558-617 |
| DEX0477_001.nt.7 | 27921 | 27921.0 | Multi-Can array | 4275-4334 |
| DEX0477_001.nt.7 | 24496 | 24496.02 | Prostatel array | 4275-4334 |
| DEX0477_001.nt.7 | 78856 | 78856.0 | Multi-Can array | 4452-4511 |
| DEX0477_001.nt.8 | 24474 | 24474.01 | Prostatel array | 3776-3835 |
| DEX0477_001.nt.8 | 27922 | 27922.0 | Multi-Can array | 4328-4387 |
| DEX0477_001.nt.8 | 78856 | 78856.0 | Multi-Can array | 4528-4587 |
| DEX0477_001.nt.8 | 27921 | 27921.0 | Multi-Can array | 4351-4410 |
| DEX0477_001.nt.8 | 24496 | 24496.02 | Prostatel array | 4351-4410 |
| DEX0477_001.nt.8 | 78855 | 78855.0 | Multi-Can array | 4533-4592 |
| DEX0477_001.nt.8 | 24536 | 24536.02 | Prostatel array | 558-617 |
| DEX0477_002.nt.1 | 24474 | 24474.01 | Prostatel array | 3776-3835 |
| DEX0477_002.nt.1 | 27922 | 27922.0 | Multi-Can array | 4141-4200 |
| DEX0477_002.nt.1 | 78855 | 78855.0 | Multi-Can array | 4346-4405 |
| DEX0477_002.nt.1 | 24496 | 24496.02 | Prostatel array | 4164-4223 |
| DEX0477_002.nt.1 | 27921 | 27921.0 | Multi-Can array | 4164-4223 |
| DEX0477_002.nt.1 | 24536 | 24536.02 | Prostatel array | 558-617 |
| DEX0477_002.nt.1 | 78856 | 78856.0 | Multi-Can array | 4341-4400 |
| DEX0477_002.nt.2 | 24536 | 24536.02 | Prostatel array | 558-617 |
| DEX0477_002.nt.2 | 78856 | 78856.0 | Multi-Can array | 1463-1522 |
| DEX0477_002.nt.2 | 24496 | 24496.02 | Prostatel array | 1286-1345 |
| DEX0477_002.nt.2 | 27922 | 27922.0 | Multi-Can array | 1263-1322 |
| DEX0477_002.nt.2 | 78855 | 78855.0 | Multi-Can array | 1468-1527 |
| DEX0477_002.nt.2 | 24474 | 24474.01 | Prostatel array | 967-1026 |
| DEX0477_002.nt.2 | 27921 | 27921.0 | Multi-Can array | 1286-1345 |
| DEX0477_001.nt.9 | 78856 | 78856.0 | Multi-Can array | 4210-4269 |
| DEX0477_001.nt.9 | 27922 | 27922.0 | Multi-Can array | 4010-4069 |
| DEX0477_001.nt.9 | 24536 | 24536.02 | Prostatel array | 558-617 |
| DEX0477_001.nt.9 | 24496 | 24496.02 | Prostatel array | 4033-4092 |
| DEX0477_001.nt.9 | 27921 | 27921.0 | Multi-Can array | 4033-4092 |
| DEX0477_001.nt.9 | 24474 | 24474.01 | Prostatel array | 3458-3517 |
| DEX0477_001.nt.9 | 78855 | 78855.0 | Multi-Can array | 4215-4274 |
| DEX0477_003.nt.1 | 105627 | 105627.0 | Multi-Can array | 993-1052 |
| DEX0477_003.nt.1 | 105624 | 105624.0 | Multi-Can array | 953-1012 |
| DEX0477_003.nt.1 | 105628 | 105628.0 | Multi-Can array | 952-1011 |
| DEX0477_003.nt.1 | 96120 | 96120.0 | Multi-Can array | 953-1012 |
| DEX0477_003.nt.2 | 105624 | 105624.0 | Multi-Can array | 1581-1640 |
| DEX0477_003.nt.2 | 105627 | 105627.0 | Multi-Can array | 1621-1680 |
| DEX0477_003.nt.2 | 96120 | 96120.0 | Multi-Can array | 1581-1640 |
| DEX0477_003.nt.2 | 105628 | 195628.0 | Multi-Can array | 1580-1639 |
| DEX0477_004.nt.1 | 1201 | 1201.0 | Multi-Can array | 290-349 |
| DEX0477_004.nt.1 | 1193 | 1193.0 | Lung array | 290-349 |
| DEX0477_004.nt.1 | 1192 | 1192.0 | Lung array | 222-281 |
| DEX0477_004.nt.1 | 1200 | 1200.0 | Multi-Can array | 224-283 |
| DEX0477_004.nt.1 | 5491 | 5491.0 | Lung array | 200-259 |
| DEX0477_004.nt.1 | 1198 | 1198.0 | Lung array | 342-401 |
| DEX0477_005.nt.1 | 15805 | 15805.0 | Breast array | 2088-2147 |
| DEX0477_005.nt.1 | 41000 | 41000.0 | Breast array | 332-391 |
| DEX0477_005.nt.1 | 20502 | 20502.0 | Colon array | 2325-2384 |
| DEX0477_005.nt.1 | 20501 | 20501.0 | Colon array | 2282-2341 |
| DEX0477_005.nt.1 | 40999 | 40999.0 | Breast array | 953-1012 |
| DEX0477_005.nt.1 | 18050 | 18050.02 | Ovary array | 2179-2238 |
| DEX0477_005.nt.1 | 18088 | 18088.01 | Ovary array | 1897-1956 |
| DEX0477_005.nt.1 | 15806 | 15806.0 | Breast array | 2128-2187 |
| DEX0477_006.nt.1 | 9744 | 9744.0 | Multi-Can array | 1700-1759 |
| DEX0477_006.nt.1 | 9745 | 9745.0 | Multi-Can array | 1654-1713 |
| DEX0477_007.nt.1 | 17853 | 17853.0 | Colon array | 272-331 |
| DEX0477_007.nt.1 | 15783 | 15783.0 | Breast array | 432-491 |
| DEX0477_007.nt.1 | 18645 | 18645.0 | Breast array | 272-331 |
| DEX0477_007.nt.1 | 18644 | 18644.0 | Breast array | 312-371 |
| DEX0477_007.nt.1 | 17852 | 17852.0 | Colon array | 312-371 |
| DEX0477_008.nt.1 | 4734 | 4734.0 | Multi-Can array | 718-777 |
| DEX0477_008.nt.1 | 1559 | 1559.0 | Lung array | 85-144 |
| DEX0477_008.nt.1 | 4733 | 4733.0 | Multi-Can array | 758-817 |
| DEX0477_009.nt.1 | 36563 | 36563.0 | Colon array | 648-707 |
| DEX0477_009.nt.1 | 990 | 990.0 | Multi-Can array | 798-853 |
| DEX0477_009.nt.1 | 36564 | 36564.0 | Colon array | 538-595 |
| DEX0477_010.nt.1 | 18088 | 18088.01 | Ovary array | 1859-1918 |
| DEX0477_010.nt.1 | 18094 | 18094.01 | Ovary array | 898-957 |
| DEX0477_010.nt.1 | 20501 | 20501.0 | Colon array | 1475-1534 |
| DEX0477_010.nt.1 | 15805 | 15805.0 | Breast array | 1669-1728 |
| DEX0477_010.nt.1 | 15806 | 15806.0 | Breast array | 1629-1688 |
| DEX0477_010.nt.1 | 18050 | 18050.02 | Ovary array | 1578-1637 |
| DEX0477_010.nt.1 | 20502 | 20502.0 | Colon array | 1432-1491 |
| DEX0477_010.nt.1 | 17464 | 17464.02 | Ovary array | 1151-1210 |
| DEX0477_011.nt.1 | 102558 | 102558.0 | Multi-Can array | 668-726 |
| DEX0477_012.nt.1 | 16992 | 16992.0 | Breast array | 251-308 |
| DEX0477_012.nt.1 | 20235 | 20235.0 | Breast array | 241-301 |
| DEX0477_012.nt.1 | 16966 | 16966.01 | Ovary array | 251-308 |
| DEX0477_012.nt.1 | 22433 | 22433.01 | Ovary array | 241-301 |
| DEX0477_013.nt.1 | 10548 | 10548.0 | Multi-Can array | 4383-4442 |
| DEX0477_013.nt.1 | 10549 | 10549.0 | Multi-Can array | 4343-4402 |
| DEX0477_013.nt.1 | 14426 | 14426.01 | Ovary array | 2692-2751 |
| DEX0477_014.nt.1 | 4538 | 4538.0 | Multi-Can array | 625-684 |
| DEX0477_014.nt.1 | 4539 | 4539.0 | Multi-Can array | 461-520 |
| DEX0477_014.nt.1 | 27950 | 27950.0 | Breast array | 461-520 |
| DEX0477_014.nt.1 | 27949 | 27949.0 | Breast array | 625-684 |
| DEX0477_014.nt.2 | 4539 | 4539.0 | Multi-Can array | 431-490 |
| DEX0477_014.nt.2 | 27949 | 27949.0 | Breast array | 595-654 |
| DEX0477_014.nt.2 | 27950 | 27950.0 | Breast array | 431-490 |
| DEX0477_014.nt.2 | 4538 | 4538.0 | Multi-Can array | 595-654 |
| DEX0477_014.nt.3 | 4539 | 4539.0 | Multi-Can array | 366-425 |
| DEX0477_014.nt.3 | 4538 | 4538.0 | Multi-Can array | 530-589 |
| DEX0477_014.nt.3 | 27949 | 27949.0 | Breast array | 530-589 |
| DEX0477_014.nt.3 | 27950 | 27950.0 | Breast array | 366-425 |
| DEX0477_015.nt.1 | 24404 | 24404.0 | Multi-Can array | 682-741 |
| DEX0477_015.nt.1 | 20399 | 20399.0 | Breast array | 687-746 |
| DEX0477_015.nt.1 | 4909 | 4909.0 | Multi-Can array | 682-741 |
| DEX0477_015.nt.1 | 24456 | 24456.02 | Prostate1 array | 627-686 |
| DEX0477_015.nt.1 | 4910 | 4910.0 | Multi-Can array | 642-701 |
| DEX0477_015.nt.1 | 17244 | 17244.0 | Breast array | 627-686 |
| DEX0477_015.nt.1 | 2084 | 2084.0 | Lung array | 627-686 |
| DEX0477_015.nt.1 | 17292 | 17292.0 | Breast array | 682-741 |
| DEX0477_015.nt.1 | 30021 | 30021.01 | Prostate1 array | 687-746 |
| DEX0477_015.nt.1 | 24405 | 24405.0 | Multi-Can array | 642-701 |
| DEX0477_015.nt.1 | 2085 | 2085.0 | Multi-Can array | 617-676 |
| DEX0477_015.nt.1 | 17293 | 17293.0 | Multi-Can array | 642-701 |
| DEX0477_015.nt.2 | 2084 | 2084.0 | Lung array | 737-796 |
| DEX0477_015.nt.2 | 24404 | 24404.0 | Multi-Can array | 792-851 |
| DEX0477_015.nt.2 | 30021 | 30021.01 | Prostate1 array | 797-856 |
| DEX0477_015.nt.2 | 17292 | 17292.0 | Breast array | 792-851 |
| DEX0477_015.nt.2 | 24405 | 24405.0 | Multi-Can array | 752-811 |
| DEX0477_015.nt.2 | 17244 | 17244.0 | Breast array | 737-796 |
| DEX0477_015.nt.2 | 4909 | 4909.0 | Multi-Can array | 792-851 |
| DEX0477_015.nt.2 | 20399 | 20399.0 | Breast array | 797-856 |
| DEX0477_015.nt.2 | 4910 | 4910.0 | Multi-Can array | 752-811 |
| DEX0477_015.nt.2 | 20391 | 20391.0 | Breast array | 416-475 |
| DEX0477_015.nt.2 | 17293 | 17293.0 | Multi-Can array | 752-811 |
| DEX0477_015.nt.2 | 24456 | 24456.02 | Prostate1 array | 737-796 |
| DEX0477_015.nt.2 | 30013 | 30013.02 | Prostate1 array | 416-475 |
| DEX0477_015.nt.2 | 2085 | 2085.0 | Multi-Can array | 727-786 |
| DEX0477_016.nt.1 | 33428 | 33428.0 | Breast array | 4502-4559 |
| DEX0477_016.nt.1 | 15232 | 15232.0 | Breast array | 1260-1319 |
| DEX0477_016.nt.1 | 15233 | 15233.0 | Breast array | 1230-1289 |
| DEX0477_016.nt.1 | 39515 | 39515.02 | Prostate1 array | 1260-1319 |
| DEX0477_016.nt.1 | 37143 | 37143.0 | Breast array | 4497-4556 |
| DEX0477_016.nt.1 | 39533 | 39533.0 | Multi-Can array | 4502-4559 |
| DEX0477_016.nt.1 | 33429 | 33429.0 | Multi-Can array | 4497-4556 |
| DEX0477_016.nt.1 | 39534 | 39534.0 | Multi-Can array | 4497-4556 |
| DEX0477_016.nt.2 | 15233 | 15233.0 | Breast array | 1203-1262 |
| DEX0477_016.nt.2 | 15232 | 15232.0 | Breast array | 1233-1292 |
| DEX0477_016.nt.2 | 39534 | 39534.0 | Multi-Can array | 4831-4890 |
| DEX0477_016.nt.2 | 37143 | 37143.0 | Breast array | 4831-4890 |
| DEX0477_016.nt.2 | 33428 | 33428.0 | Breast array | 4836-4893 |
| DEX0477_016.nt.2 | 33429 | 33429.0 | Multi-Can array | 4831-4890 |
| DEX0477_016.nt.2 | 39515 | 39515.02 | Prostate1 array | 1233-1292 |
| DEX0477_016.nt.2 | 39533 | 39533.0 | Multi-Can array | 4836-4893 |
| DEX0477_016.nt.4 | 37143 | 37143.0 | Breast array | 1046-1105 |
| DEX0477_016.nt.4 | 33429 | 33429.0 | Multi-Can array | 1046-1105 |
| DEX0477_016.nt.4 | 39534 | 39534.0 | Multi-Can array | 1046-1105 |
| DEX0477_016.nt.4 | 33428 | 33428.0 | Breast array | 1051-1108 |
| DEX0477_016.nt.5 | 39533 | 39533.0 | Multi-Can array | 726-783 |
| DEX0477_016.nt.5 | 33429 | 33429.0 | Multi-Can array | 721-780 |
| DEX0477_016.nt.5 | 39534 | 39534.0 | Multi-Can array | 721-780 |
| DEX0477_016.nt.5 | 37143 | 37143.0 | Breast array | 721-780 |
| DEX0477_017.nt.1 | 15233 | 15233.0 | Breast array | 1203-1262 |
| DEX0477_017.nt.1 | 15232 | 15232.0 | Breast array | 1233-1292 |
| DEX0477_017.nt.1 | 39515 | 39515.02 | Prostate1 array | 1233-1292 |
| DEX0477_018.nt.1 | 102558 | 102558.0 | Multi-Can array | 1155-1214 |
| DEX0477_018.nt.1 | 11369 | 11369.0 | Colon array | 1181-1240 |
| DEX0477_018.nt.1 | 22280 | 22280.0 | Breast array | 902-961 |
| DEX0477_018.nt.1 | 102557 | 102557.0 | Multi-Can array | 1242-1300 |
| DEX0477_018.nt.1 | 34918 | 34918.01 | Prostate1 array | 1194-1253 |
| DEX0477_019.nt.1 | 41940 | 41940.0 | Multi-Can array | 1367-1426 |
| DEX0477_019.nt.1 | 102787 | 102787.0 | Multi-Can array | 1673-1732 |
| DEX0477_019.nt.1 | 102786 | 102786.0 | Multi-Can array | 1683-1742 |
| DEX0477_019.nt.1 | 78628 | 78628.0 | Multi-Can array | 1424-1483 |
| DEX0477_019.nt.1 | 102785 | 102785.0 | Multi-Can array | 1378-1429 |
| DEX0477_019.nt.1 | 102789 | 102789.0 | Multi-Can array | 1683-1742 |
| DEX0477_019.nt.1 | 78627 | 78627.0 | Multi-Can array | 1425-1484 |
| DEX0477_019.nt.1 | 41937 | 41937.0 | Breast array | 1449-1508 |
| DEX0477_019.nt.1 | 94127 | 94127.0 | Multi-Can array | 1378-1429 |
| DEX0477_019.nt.1 | 94128 | 94128.0 | Multi-Can array | 1683-1742 |
| DEX0477_019.nt.1 | 41938 | 41938.0 | Breast array | 1645-1704 |
| DEX0477_019.nt.1 | 34316 | 34316.0 | Colon array | 1074-1133 |
| DEX0477_019.nt.1 | 34317 | 34317.0 | Colon array | 855-914 |
| DEX0477_019.nt.1 | 41939 | 41939.0 | Multi-Can array | 1367-1426 |
| DEX0477_020.nt.1 | 34317 | 34317.0 | Colon array | 2074-2133 |
| DEX0477_020.nt.1 | 41940 | 41940.0 | Multi-Can array | 2586-2645 |
| DEX0477_020.nt.1 | 102789 | 102789.0 | Multi-Can array | 2872-2931 |
| DEX0477_020.nt.1 | 41937 | 41937.0 | Breast array | 2668-2727 |
| DEX0477_020.nt.1 | 102787 | 102787.0 | Multi-Can array | 2862-2921 |
| DEX0477_020.nt.1 | 78627 | 78627.0 | Multi-Can array | 2644-2703 |
| DEX0477_020.nt.1 | 41938 | 41938.0 | Breast array | 2834-2893 |
| DEX0477_020.nt.1 | 102786 | 102786.0 | Multi-Can array | 2872-2931 |
| DEX0477_020.nt.1 | 78628 | 78628.0 | Multi-Can array | 2643-2702 |
| DEX0477_020.nt.1 | 34316 | 34316.0 | Colon array | 2293-2352 |
| DEX0477_020.nt.1 | 32726 | 32726.0 | Colon array | 1267-1326 |
| DEX0477_020.nt.1 | 41939 | 41939.0 | Multi-Can array | 2586-2645 |
| DEX0477_020.nt.1 | 94128 | 94128.0 | Multi-Can array | 2872-2931 |
| DEX0477_020.nt.2 | 32726 | 32726.0 | Colon array | 1267-1326 |
| DEX0477_020.nt.2 | 102789 | 102789.0 | Multi-Can array | 2783-2842 |
| DEX0477_020.nt.2 | 78628 | 78628.0 | Multi-Can array | 2524-2583 |
| DEX0477_020.nt.2 | 41938 | 41938.0 | Breast array | 2745-2804 |
| DEX0477_020.nt.2 | 34316 | 34316.0 | Colon array | 2174-2233 |
| DEX0477_020.nt.2 | 102787 | 102787.0 | Multi-Can array | 2773-2832 |
| DEX0477_020.nt.2 | 78627 | 78627.0 | Multi-Can array | 2525-2584 |
| DEX0477_020.nt.2 | 41939 | 41939.0 | Multi-Can array | 2467-2526 |
| DEX0477_020.nt.2 | 102786 | 102786.0 | Multi-Can array | 2783-2842 |
| DEX0477_020.nt.2 | 34317 | 34317.0 | Colon array | 2074-2133 |
| DEX0477_020.nt.2 | 41940 | 41940.0 | Multi-Can array | 2467-2526 |
| DEX0477_020.nt.2 | 94128 | 94128.0 | Multi-Can array | 2783-2842 |
| DEX0477_020.nt.2 | 41937 | 41937.0 | Breast array | 2549-2608 |
| DEX0477_021.nt.1 | 26771 | 26771.0 | Breast array | 205-264 |
| DEX0477_021.nt.1 | 41945 | 41945.0 | Multi-Can array | 289-348 |
| DEX0477_021.nt.1 | 27321 | 27321.0 | Breast array | 638-697 |
| DEX0477_021.nt.1 | 26770 | 26770.0 | Breast array | 249-308 |
| DEX0477_021.nt.1 | 27322 | 27322.0 | Breast array | 541-600 |
| DEX0477_021.nt.1 | 33089 | 33089.0 | Breast array | 541-600 |
| DEX0477_021.nt.1 | 33088 | 33088.0 | Breast array | 638-697 |
| DEX0477_021.nt.1 | 41946 | 41946.0 | Multi-Can array | 289-348 |
| DEX0477_021.nt.2 | 27322 | 27322.0 | Breast array | 524-583 |
| DEX0477_021.nt.2 | 26770 | 26770.0 | Breast array | 232-291 |
| DEX0477_021.nt.2 | 33089 | 33089.0 | Breast array | 524-583 |
| DEX0477_021.nt.2 | 41945 | 41945.0 | Multi-Can array | 272-331 |
| DEX0477_021.nt.2 | 26771 | 26771.0 | Breast array | 188-247 |
| DEX0477_021.nt.2 | 41946 | 41946.0 | Multi-Can array | 272-331 |
| DEX0477_021.nt.2 | 27321 | 27321.0 | Breast array | 621-680 |
| DEX0477_021.nt.2 | 33088 | 33088.0 | Breast array | 621-680 |
| DEX0477_022.nt.1 | 78628 | 78628.0 | Multi-Can array | 161-220 |
| DEX0477_022.nt.1 | 41939 | 41939.0 | Multi-Can array | 104-163 |
| DEX0477_022.nt.1 | 41940 | 41940.0 | Multi-Can array | 104-163 |
| DEX0477_022.nt.1 | 78627 | 78627.0 | Multi-Can array | 162-221 |
| DEX0477_022.nt.1 | 41937 | 41937.0 | Breast array | 186-245 |
| DEX0477_023.nt.1 | 27321 | 27321.0 | Breast array | 100-157 |
| DEX0477_023.nt.1 | 33088 | 33088.0 | Breast array | 100-157 |
| DEX0477_024.nt.1 | 26770 | 26770.0 | Breast array | 246-305 |
| DEX0477_024.nt.1 | 26771 | 26771.0 | Breast array | 202-261 |
| DEX0477_024.nt.1 | 41946 | 41946.0 | Multi-Can array | 286-345 |
| DEX0477_024.nt.1 | 41945 | 41945.0 | Multi-Can array | 286-345 |
| DEX0477_024.nt.2 | 41946 | 41946.0 | Multi-Can array | 307-366 |
| DEX0477_024.nt.2 | 26771 | 26771.0 | Breast array | 223-282 |
| DEX0477_024.nt.2 | 41945 | 41945.0 | Multi-Can array | 307-366 |
| DEX0477_024.nt.2 | 26770 | 26770.0 | Breast array | 267-326 |
| DEX0477_024.nt.3 | 41946 | 41946.0 | Multi-Can array | 299-358 |
| DEX0477_024.nt.3 | 26771 | 26771.0 | Breast array | 215-274 |
| DEX0477_024.nt.3 | 41945 | 41945.0 | Multi-Can array | 299-358 |
| DEX0477_024.nt.3 | 26770 | 26770.0 | Breast array | 259-318 |
| DEX0477_024.nt.4 | 41945 | 41945.0 | Multi-Can array | 66-125 |
| DEX0477_024.nt.4 | 41946 | 41946.0 | Multi-Can array | 66-125 |
| DEX0477_024.nt.4 | 26770 | 26770.0 | Breast array | 34-85 |
| DEX0477_025.nt.1 | 889 | 889.0 | Lung array | 344-404 |
| DEX0477_025.nt.1 | 19468 | 19468.0 | Breast array | 324-384 |
| DEX0477_025.nt.1 | 10702 | 10702.02 | Ovary array | 582-641 |
| DEX0477_025.nt.1 | 18214 | 18214.02 | Ovary array | 344-404 |
| DEX0477_025.nt.1 | 19469 | 19469.0 | Breast array | 278-337 |
| DEX0477_025.nt.1 | 890 | 890.0 | Lung array | 258-317 |
| DEX0477_026.nt.1 | 37685 | 37685.0 | Colon array | 3647-3706 |
| DEX0477_026.nt.1 | 37686 | 37686.0 | Colon array | 3501-3560 |
| DEX0477_026.nt.1 | 16950 | 16950.0 | Breast array | 2544-2603 |
| DEX0477_026.nt.1 | 16123 | 16123.01 | Ovary array | 2544-2603 |
| DEX0477_027.nt.1 | 5236 | 5236.0 | Multi-Can array | 146-205 |
| DEX0477_027.nt.1 | 5235 | 5235.0 | Lung array | 156-215 |
| DEX0477_027.nt.1 | 2441 | 2441.0 | Multi-Can array | 156-215 |
| DEX0477_027.nt.1 | 2440 | 2440.0 | Lung array | 161-220 |
| DEX0477_027.nt.2 | 2441 | 2441.0 | Multi-Can array | 498-557 |
| DEX0477_027.nt.2 | 5236 | 5236.0 | Multi-Can array | 488-547 |
| DEX0477_027.nt.2 | 5235 | 5235.0 | Lung array | 498-557 |
| DEX0477_027.nt.3 | 2441 | 2441.0 | Multi-Can array | 435-494 |
| DEX0477_027.nt.3 | 2440 | 2440.0 | Lung array | 440-499 |
| DEX0477_027.nt.3 | 5236 | 5236.0 | Multi-Can array | 425-484 |
| DEX0477_027.nt.3 | 5235 | 5235.0 | Lung array | 435-494 |
| DEX0477_027.nt.4 | 2441 | 2441.0 | Multi-Can array | 153-212 |
| DEX0477_027.nt.4 | 2440 | 2440.0 | Lung array | 158-217 |
| DEX0477_027.nt.4 | 5235 | 5235.0 | Lung array | 153-212 |
| DEX0477_027.nt.4 | 5236 | 5236.0 | Multi-Can array | 143-202 |
| DEX0477_027.nt.5 | 2441 | 2441.0 | Multi-Can array | 682-741 |
| DEX0477_027.nt.5 | 2440 | 2440.0 | Lung array | 687-746 |
| DEX0477_027.nt.5 | 5236 | 5236.0 | Multi-Can array | 672-731 |
| DEX0477_027.nt.5 | 5235 | 5235.0 | Lung array | 682-741 |
| DEX0477_027.nt.5 | 13661 | 13661.0 | Breast array | 924-983 |
| DEX0477_027.nt.6 | 2441 | 2441.0 | Multi-Can array | 1157-1216 |
| DEX0477_027.nt.6 | 5235 | 5235.0 | Lung array | 1157-1216 |
| DEX0477_027.nt.6 | 5236 | 5236.0 | Multi-Can array | 1147-1206 |
| DEX0477_027.nt.6 | 2440 | 2440.0 | Lung array | 1162-1221 |
| DEX0477_027.nt.7 | 5235 | 5235.0 | Lung array | 354-413 |
| DEX0477_027.nt.7 | 5236 | 5236.0 | Multi-Can array | 344-403 |
| DEX0477_027.nt.7 | 13661 | 13661.0 | Breast array | 596-655 |
| DEX0477_027.nt.7 | 2440 | 2440.0 | Lung array | 359-418 |
| DEX0477_027.nt.7 | 2441 | 2441.0 | Multi-Can array | 354-413 |
| DEX0477_028.nt.1 | 10454 | 10454.02 | Ovary array | 7535-7594 |
| DEX0477_028.nt.1 | 23665 | 23665.0 | Breast array | 7434-7493 |
| DEX0477_028.nt.2 | 10454 | 10454.02 | Ovary array | 7077-7136 |
| DEX0477_028.nt.2 | 23665 | 23665.0 | Breast array | 6976-7035 |
| DEX0477_028.nt.3 | 10454 | 10454.02 | Ovary array | 7256-7315 |
| DEX0477_028.nt.4 | 23665 | 23665.0 | Breast array | 7106-7165 |
| DEX0477_028.nt.4 | 10454 | 10454.02 | Ovary array | 7207-7266 |
| DEX0477_029.nt.1 | 23665 | 23665.0 | Breast array | 7222-7281 |
| DEX0477_030.nt.1 | 26136 | 26136.01 | Prostate1 array | 849-908 |
| DEX0477_030.nt.1 | 28117 | 28117.0 | Multi-Can array | 1101-1160 |
| DEX0477_030.nt.1 | 28118 | 28118.0 | Multi-Can array | 1061-1120 |
| DEX0477_030.nt.1 | 26130 | 26130.02 | Prostate1 array | 690-749 |
| DEX0477_030.nt.2 | 26136 | 26136.01 | Prostate1 array | 570-629 |
| DEX0477_030.nt.2 | 28118 | 28118.0 | Multi-Can array | 782-841 |
| DEX0477_030.nt.2 | 26130 | 26130.02 | Prostate1 array | 411-470 |
| DEX0477_030.nt.2 | 28117 | 28117.0 | Multi-Can array | 822-881 |
| DEX0477_030.nt.3 | 28118 | 28118.0 | Multi-Can array | 222-281 |
| DEX0477_030.nt.3 | 28117 | 28117.0 | Multi-Can array | 262-321 |
| DEX0477_031.nt.1 | 23481 | 23481.0 | Multi-Can array | 477-536 |
| DEX0477_031.nt.1 | 37430 | 37430.0 | Colon array | 7-66 |
| DEX0477_031.nt.1 | 23484 | 23484.01 | Prostate1 array | 497-556 |
| DEX0477_031.nt.1 | 38627 | 38627.0 | Multi-Can array | 497-556 |
| DEX0477_031.nt.1 | 38628 | 38628.0 | Colon array | 477-536 |
| DEX0477_031.nt.1 | 37429 | 37429.0 | Colon array | 47-106 |
| DEX0477_031.nt.1 | 23480 | 23480.0 | Multi-Can array | 497-556 |
| DEX0477_031.nt.1 | 23674 | 23674.01 | Prostate1 array | 47-106 |
| DEX0477_031.nt.1 | 38625 | 38625.0 | Colon array | 497-556 |
| DEX0477_032.nt.1 | 41924 | 41924.0 | Colon array | 1000-1059 |
| DEX0477_032.nt.1 | 21709 | 21709.02 | Ovary array | 504-563 |
| DEX0477_032.nt.1 | 41923 | 41923.0 | Colon array | 1131-1190 |
| DEX0477_032.nt.1 | 11307 | 11307.02 | Ovary array | 1824-1883 |
| DEX0477_032.nt.1 | 21779 | 21779.02 | Ovary array | 1824-1883 |
| DEX0477_032.nt.1 | 22353 | 22353.01 | Ovary array | 1131-1190 |
| DEX0477_033.nt.1 | 19534 | 19534.0 | Breast array | 454-513 |
| DEX0477_033.nt.1 | 21523 | 21523.02 | Ovary array | 218-277 |
| DEX0477_033.nt.1 | 38704 | 38704.0 | Colon array | 178-237 |
| DEX0477_033.nt.1 | 35175 | 35175.0 | Colon array | 432-491 |
| DEX0477_033.nt.1 | 41957 | 41957.0 | Multi-Can array | 410-469 |
| DEX0477_033.nt.1 | 3411 | 3411.0 | Lung array | 432-491 |
| DEX0477_033.nt.1 | 41958 | 41958.0 | Multi-Can array | 410-469 |
| DEX0477_033.nt.1 | 3410 | 3410.0 | Lung array | 454-513 |
| DEX0477_033.nt.1 | 38703 | 38703.0 | Colon array | 218-277 |
| DEX0477_033.nt.1 | 24504 | 24504.01 | Ovary array | 454-513 |
| DEX0477_033.nt.1 | 1350 | 1350.0 | Lung array | 218-277 |
| DEX0477_033.nt.1 | 35174 | 35174.0 | Colon array | 454-513 |
| DEX0477_033.nt.1 | 1351 | 1351.0 | Lung array | 178-237 |
| DEX0477_033.nt.1 | 19535 | 19535.0 | Breast array | 432-491 |
| DEX0477_033.nt.2 | 38703 | 38703.0 | Colon array | 337-396 |
| DEX0477_033.nt.2 | 3410 | 3410.0 | Lung array | 573-632 |
| DEX0477_033.nt.2 | 19535 | 19535.0 | Breast array | 551-610 |
| DEX0477_033.nt.2 | 35175 | 35175.0 | Colon array | 551-610 |
| DEX0477_033.nt.2 | 1351 | 1351.0 | Lung array | 297-356 |
| DEX0477_033.nt.2 | 35174 | 35174.0 | Colon array | 573-632 |
| DEX0477_033.nt.2 | 21523 | 21523.02 | Ovary array | 337-396 |
| DEX0477_033.nt.2 | 38704 | 38704.0 | Colon array | 297-356 |
| DEX0477_033.nt.2 | 19534 | 19534.0 | Breast array | 573-632 |
| DEX0477_033.nt.2 | 3411 | 3411.0 | Lung array | 551-610 |
| DEX0477_033.nt.2 | 41958 | 41958.0 | Multi-Can array | 529-588 |
| DEX0477_033.nt.2 | 1350 | 1350.0 | Lung array | 337-396 |
| DEX0477_033.nt.2 | 41957 | 41957.0 | Multi-Can array | 529-588 |
| DEX0477_033.nt.2 | 24504 | 24504.01 | Ovary array | 573-632 |
| DEX0477_033.nt.3 | 41958 | 41958.0 | Multi-Can array | 531-590 |
| DEX0477_033.nt.3 | 38703 | 38703.0 | Colon array | 339-398 |
| DEX0477_033.nt.3 | 1350 | 1350.0 | Lung array | 339-398 |
| DEX0477_033.nt.3 | 3410 | 3410.0 | Lung array | 575-634 |
| DEX0477_033.nt.3 | 1351 | 1351.0 | Lung array | 299-358 |
| DEX0477_033.nt.3 | 24504 | 24504.01 | Ovary array | 575-634 |
| DEX0477_033.nt.3 | 35174 | 35174.0 | Colon array | 575-634 |
| DEX0477_033.nt.3 | 21523 | 21523.02 | Ovary array | 339-398 |
| DEX0477_033.nt.3 | 19535 | 19535.0 | Breast array | 553-612 |
| DEX0477_033.nt.3 | 35175 | 35175.0 | Colon array | 553-612 |
| DEX0477_033.nt.3 | 19534 | 19534.0 | Breast array | 575-634 |
| DEX0477_033.nt.3 | 3411 | 3411.0 | Lung array | 553-612 |
| DEX0477_033.nt.3 | 38704 | 38704.0 | Colon array | 299-358 |
| DEX0477_033.nt.3 | 41957 | 41957.0 | Multi-Can array | 531-590 |
| DEX0477_034.nt.1 | 3932 | 3932.0 | Lung array | 491-550 |
| DEX0477_034.nt.1 | 3933 | 3933.0 | Multi-Can array | 481-540 |
| DEX0477_035.nt.1 | 932 | 932.0 | Lung array | 583-642 |
| DEX0477_035.nt.1 | 886 | 886.0 | Lung array | 647-706 |
| DEX0477_035.nt.1 | 973 | 973.0 | Multi-Can array | 341-400 |
| DEX0477_035.nt.1 | 972 | 972.0 | Lung array | 341-400 |
| DEX0477_035.nt.1 | 976 | 976.0 | Lung array | 384-443 |
| DEX0477_035.nt.1 | 887 | 887.0 | Lung array | 412-471 |
| DEX0477_035.nt.1 | 39948 | 39948.0 | Colon array | 384-443 |
| DEX0477_035.nt.1 | 995 | 995.0 | Lung array | 405-464 |
| DEX0477_035.nt.1 | 888 | 888.0 | Lung array | 362-421 |
| DEX0477_035.nt.1 | 4922 | 4922.0 | Lung array | 384-443 |
| DEX0477_035.nt.1 | 4921 | 4921.0 | Lung array | 646-705 |
| DEX0477_035.nt.1 | 931 | 931.0 | Lung array | 646-705 |
| DEX0477_035.nt.1 | 974 | 974.0 | Lung array | 319-378 |
| DEX0477_035.nt.1 | 885 | 885.0 | Lung array | 657-716 |
| DEX0477_035.nt.1 | 996 | 996.0 | Multi-Can array | 646-705 |
| DEX0477_035.nt.2 | 39948 | 39948.0 | Colon array | 416-475 |
| DEX0477_035.nt.2 | 973 | 973.0 | Multi-Can array | 373-432 |
| DEX0477_035.nt.2 | 995 | 995.0 | Lung array | 437-496 |
| DEX0477_035.nt.2 | 887 | 887.0 | Lung array | 444-503 |
| DEX0477_035.nt.2 | 974 | 974.0 | Lung array | 351-410 |
| DEX0477_035.nt.2 | 972 | 972.0 | Lung array | 373-432 |
| DEX0477_035.nt.2 | 4922 | 4922.0 | Lung array | 416-475 |
| DEX0477_035.nt.2 | 976 | 976.0 | Lung array | 416-475 |
| DEX0477_035.nt.2 | 888 | 888.0 | Lung array | 394-453 |
| DEX0477_035.nt.3 | 976 | 976.0 | Lung array | 557-616 |
| DEX0477_035.nt.3 | 888 | 888.0 | Lung array | 535-594 |
| DEX0477_035.nt.3 | 932 | 932.0 | Lung array | 756-815 |
| DEX0477_035.nt.3 | 974 | 974.0 | Lung array | 492-551 |
| DEX0477_035.nt.3 | 39948 | 39948.0 | Colon array | 557-616 |
| DEX0477_035.nt.3 | 973 | 973.0 | Multi-Can array | 514-573 |
| DEX0477_035.nt.3 | 972 | 972.0 | Lung array | 514-573 |
| DEX0477_035.nt.3 | 4922 | 4922.0 | Lung array | 557-616 |
| DEX0477_035.nt.3 | 887 | 887.0 | Lung array | 585-644 |
| DEX0477_035.nt.3 | 995 | 995.0 | Lung array | 578-637 |
| DEX0477_035.nt.4 | 974 | 974.0 | Lung array | 655-714 |
| DEX0477_035.nt.4 | 888 | 888.0 | Lung array | 698-757 |
| DEX0477_035.nt.4 | 976 | 976.0 | Lung array | 720-779 |
| DEX0477_035.nt.4 | 996 | 996.0 | Multi-Can array | 945-1004 |
| DEX0477_035.nt.4 | 931 | 931.0 | Lung array | 945-1004 |
| DEX0477_035.nt.4 | 4922 | 4922.0 | Lung array | 720-779 |
| DEX0477_035.nt.4 | 886 | 886.0 | Lung array | 946-1005 |
| DEX0477_035.nt.4 | 932 | 932.0 | Lung array | 882-941 |
| DEX0477_035.nt.4 | 4921 | 4921.0 | Lung array | 945-1004 |
| DEX0477_035.nt.4 | 885 | 885.0 | Lung array | 956-1015 |
| DEX0477_035.nt.4 | 39948 | 39948.0 | Colon array | 720-779 |
| DEX0477_035.nt.4 | 887 | 887.0 | Lung array | 748-807 |
| DEX0477_035.nt.4 | 972 | 972.0 | Lung array | 677-736 |
| DEX0477_035.nt.4 | 995 | 995.0 | Lung array | 741-800 |
| DEX0477_035.nt.4 | 973 | 973.0 | Multi-Can array | 677-736 |
| DEX0477_035.nt.5 | 931 | 931.0 | Lung array | 758-817 |
| DEX0477_035.nt.5 | 996 | 996.0 | Multi-Can array | 758-817 |
| DEX0477_035.nt.5 | 885 | 885.0 | Lung array | 769-828 |
| DEX0477_035.nt.5 | 4921 | 4921.0 | Lung array | 758-817 |
| DEX0477_035.nt.5 | 932 | 932.0 | Lung array | 695-754 |
| DEX0477_035.nt.5 | 886 | 886.0 | Lung array | 759-818 |
| DEX0477_036.nt.1 | 2370 | 2370.0 | Lung array | 573-632 |
| DEX0477_036.nt.1 | 2371 | 2371.0 | Multi-Can array | 563-622 |
| DEX0477_036.nt.1 | 3111 | 3111.0 | Multi-Can array | 976-1035 |
| DEX0477_036.nt.1 | 2442 | 2442.0 | Multi-Can array | 573-632 |
| DEX0477_036.nt.1 | 2406 | 2406.0 | Multi-Can array | 573-632 |
| DEX0477_036.nt.1 | 2443 | 2443.0 | Lung array | 563-622 |
| DEX0477_036.nt.1 | 2407 | 2407.0 | Lung array | 543-602 |
| DEX0477_036.nt.1 | 2446 | 2446.0 | Lung array | 996-1055 |
| DEX0477_037.nt.1 | 34940 | 34940.0 | Colon array | 4-60 |
| DEX0477_037.nt.1 | 17118 | 17118.02 | Ovary array | 851-910 |
| DEX0477_038.nt.1 | 18212 | 18212.01 | Ovary array | 489-548 |
| DEX0477_038.nt.1 | 10209 | 10209.0 | Colon array | 449-508 |
| DEX0477_038.nt.1 | 2644 | 2644.0 | Lung array | 365-423 |
| DEX0477_038.nt.1 | 10208 | 10208.0 | Colon array | 489-547 |
| DEX0477_038.nt.2 | 2644 | 2644.0 | Lung array | 322-381 |
| DEX0477_038.nt.2 | 18212 | 18212.01 | Ovary array | 447-506 |
| DEX0477_038.nt.2 | 10209 | 10209.0 | Colon array | 407-466 |
| DEX0477_038.nt.2 | 10208 | 10208.0 | Colon array | 447-505 |
| DEX0477_038.nt.3 | 2644 | 2644.0 | Lung array | 312-370 |
| DEX0477_038.nt.3 | 10209 | 10209.0 | Colon array | 396-455 |
| DEX0477_038.nt.3 | 18212 | 18212.01 | Ovary array | 436-495 |
| DEX0477_039.nt.1 | 23674 | 23674.01 | Prostate1 array | 297-356 |
| DEX0477_039.nt.1 | 23480 | 23480.0 | Multi-Can array | 747-806 |
| DEX0477_039.nt.1 | 38627 | 38627.0 | Multi-Can array | 747-806 |
| DEX0477_039.nt.1 | 23481 | 23481.0 | Multi-Can array | 727-786 |
| DEX0477_039.nt.1 | 38628 | 38628.0 | Colon array | 727-786 |
| DEX0477_039.nt.1 | 38625 | 38625.0 | Colon array | 747-806 |
| DEX0477_039.nt.1 | 37429 | 37429.0 | Colon array | 297-356 |
| DEX0477_039.nt.1 | 23484 | 23484.01 | Prostate1 array | [symbol] 7-806 |
| DEX0477_040.nt.1 | 10993 | 10993.0 | Colon array | 1413-1472 |
| DEX0477_040.nt.1 | 15394 | 15394.0 | Breast array | 693-752 |
| DEX0477_040.nt.1 | 3717 | 3717.0 | Lung array | 1648-1707 |
| DEX0477_040.nt.1 | 10992 | 10992.0 | Colon array | 1431-1490 |
| DEX0477_040.nt.1 | 19274 | 19274.02 | Ovary array | 270-329 |
| DEX0477_040.nt.1 | 3716 | 3716.0 | Lung array | 1688-1745 |
| DEX0477_040.nt.2 | 3717 | 3717.0 | Lung array | 1291-1350 |
| DEX0477_040.nt.2 | 3716 | 3716.0 | Lung array | 1331-1388 |
| DEX0477_040.nt.2 | 19274 | 19274.02 | Ovary array | 270-329 |
| DEX0477_040.nt.2 | 15394 | 15394.0 | Breast array | 693-752 |
| DEX0477_041.nt.1 | 28696 | 28696.0 | Colon array | 461-520 |
| DEX0477_041.nt.1 | 11295 | 11295.01 | Ovary array | 13-66 |
| DEX0477_042.nt.1 | 3382 | 3382.0 | Lung array | 177-236 |
| DEX0477_042.nt.1 | 3383 | 3383.0 | Multi-Can array | 175-234 |
| DEX0477_043.nt.1 | 1190 | 1190.0 | Lung array | 357-416 |
| DEX0477_043.nt.1 | 1234 | 1234.0 | Lung array | 538-597 |
| DEX0477_043.nt.1 | 18496 | 18496.01 | Ovary array | 357-416 |
| DEX0477_043.nt.1 | 1191 | 1191.0 | Lung array | 294-352 |
| DEX0477_043.nt.1 | 1235 | 1235.0 | Lung array | 508-567 |
| DEX0477_043.nt.1 | 18480 | 18480.02 | Ovary array | 538-597 |
| DEX0477_044.nt.1 | 21032 | 21032.0 | Colon array | 1122-1181 |
| DEX0477_044.nt.1 | 36481 | 36481.0 | Multi-Can array | 1247-1306 |
| DEX0477_044.nt.1 | 39567 | 39567.02 | Prostate1 array | 1649-1708 |
| DEX0477_044.nt.1 | 36482 | 36482.0 | Multi-Can array | 1122-1181 |
| DEX0477_044.nt.2 | 39567 | 39567.02 | Prostate1 array | 1696-1755 |
| DEX0477_044.nt.2 | 36481 | 36481.0 | Multi-Can array | 1294-1353 |
| DEX0477_044.nt.2 | 36482 | 36482.0 | Multi-Can array | 1169-1228 |
| DEX0477_044.nt.2 | 21032 | 21032.0 | Colon array | 1169-1228 |
| DEX0477_044.nt.3 | 39567 | 39567.02 | Prostate1 array | 684-743 |
| DEX0477_044.nt.3 | 21032 | 21032.0 | Colon array | 157-216 |
| DEX0477_044.nt.3 | 36481 | 36481.0 | Multi-Can array | 282-341 |
| DEX0477_044.nt.3 | 36482 | 36482.0 | Multi-Can array | 157-216 |
| DEX0477_046.nt.1 | 1551 | 1551.0 | Multi-Can array | 359-418 |
| DEX0477_046.nt.1 | 1552 | 1552.0 | Lung array | 359-418 |
| DEX0477_046.nt.1 | 1553 | 1553.0 | Lung array | 290-349 |
| DEX0477_046.nt.1 | 1550 | 1550.0 | Lung array | 415-474 |
| DEX0477_047.nt.1 | 13195 | 13195.0 | Breast array | 984-1043 |
| DEX0477_047.nt.1 | 451 | 451.0 | Lung array | 997-1056 |
| DEX0477_047.nt.1 | 452 | 452.0 | Multi-Can array | 984-1043 |
| DEX0477_048.nt.1 | 26800 | 26800.02 | Prostate1 array | 786-845 |
| DEX0477_048.nt.1 | 33514 | 33514.0 | Multi-Can array | 1237-1296 |
| DEX0477_048.nt.1 | 33515 | 33515.0 | Multi-Can array | 1044-1103 |
| DEX0477_048.nt.2 | 33514 | 33514.0 | Multi-Can array | 1237-1296 |
| DEX0477_048.nt.2 | 26800 | 26800.02 | Prostate1 array | 786-845 |
| DEX0477_048.nt.2 | 33515 | 33515.0 | Multi-Can array | 1044-1103 |
| DEX0477_048.nt.3 | 26800 | 26800.02 | Prostate1 array | 786-845 |
| DEX0477_048.nt.3 | 33515 | 33515.0 | Multi-Can array | 1270-1329 |
| DEX0477_048.nt.3 | 33514 | 33514.0 | Multi-Can array | 1463-1522 |
| DEX0477_048.nt.4 | 33515 | 33515.0 | Multi-Can array | 900-959 |
| DEX0477_048.nt.4 | 26800 | 26800.02 | Prostate1 array | 642-701 |
| DEX0477_048.nt.4 | 33514 | 33514.0 | Multi-Can array | 1093-1152 |
| DEX0477_049.nt.1 | 26800 | 26800.02 | Prostate1 array | 786-845 |
| DEX0477_049.nt.2 | 29958 | 29958.0 | Breast array | 435-494 |
| DEX0477_049.nt.2 | 13354 | 13354.0 | Breast array | 336-395 |
| DEX0477_049.nt.2 | 13353 | 13353.0 | Breast array | 376-435 |
| DEX0477_049.nt.2 | 12595 | 12595.0 | Breast array | 535-594 |
| DEX0477_050.nt.1 | 1234 | 1234.0 | Lung array | 575-634 |
| DEX0477_050.nt.1 | 18496 | 18496.01 | Ovary array | 394-453 |
| DEX0477_050.nt.1 | 1191 | 1191.0 | Lung array | 331-389 |
| DEX0477_050.nt.1 | 1235 | 1235.0 | Lung array | 545-604 |
| DEX0477_050.nt.1 | 18480 | 18480.02 | Ovary array | 575-634 |
| DEX0477_050.nt.1 | 1190 | 1190.0 | Lung array | 394-453 |
| DEX0477_050.nt.1 | 1606 | 1606.0 | Lung array | 1378-1437 |
| DEX0477_051.nt.1 | 1607 | 1607.0 | Lung array | 1368-1427 |
| DEX0477_051.nt.1 | 1642 | 1642.0 | Lung array | 645-704 |
| DEX0477_051.nt.1 | 3080 | 3080.0 | Lung array | 1482-1541 |
| DEX0477_051.nt.1 | 3081 | 3081.0 | Multi-Can array | 1366-1425 |
| DEX0477_052.nt.1 | 10766 | 10766.0 | Multi-Can array | 1215-1273 |
| DEX0477_052.nt.1 | 10767 | 10767.0 | Multi-Can array | 1196-1255 |
| DEX0477_052.nt.1 | 21369 | 21369.02 | Ovary array | 1020-1079 |
| DEX0477_053.nt.1 | 1191 | 1191.0 | Lung array | 379-437 |
| DEX0477_053.nt.1 | 18496 | 18496.01 | Ovary array | 442-501 |
| DEX0477_053.nt.1 | 18480 | 18480.02 | Ovary array | 623-682 |
| DEX0477_053.nt.1 | 1235 | 1235.0 | Lung array | 593-652 |
| DEX0477_053.nt.1 | 1190 | 1190.0 | Lung array | 442-501 |
| DEX0477_053.nt.1 | 1234 | 1234.0 | Lung array | 623-682 |
| DEX0477_054.nt.1 | 9340 | 9340.0 | Breast array | 332-391 |
| DEX0477_054.nt.2 | 9341 | 9341.0 | Breast array | 675-734 |
| DEX0477_055.nt.1 | 5606 | 5606.0 | Lung array | 521-580 |
| DEX0477_055.nt.1 | 5624 | 5624.0 | Lung array | 610-663 |
| DEX0477_055.nt.1 | 20563 | 20563.01 | Ovary array | 892-951 |
| DEX0477_055.nt.1 | 5612 | 5612.0 | Multi-Can array | 512-571 |
| DEX0477_055.nt.1 | 5611 | 5611.0 | Lung array | 574-633 |
| DEX0477_055.nt.1 | 5640 | 5640.0 | Lung array | 1762-1821 |
| DEX0477_055.nt.1 | 20503 | 20503.01 | Ovary array | 574-633 |
| DEX0477_055.nt.1 | 5639 | 5639.0 | Lung array | 1767-1826 |
| DEX0477_055.nt.1 | 20601 | 20601.01 | Ovary array | 1318-1377 |
| DEX0477_055.nt.1 | 1190 | 1190.0 | Lung array | 431-490 |
| DEX0477_055.nt.1 | 5637 | 5637.0 | Lung array | 1318-1377 |
| DEX0477_055.nt.1 | 20553 | 20553.02 | Ovary array | 1767-1826 |
| DEX0477_055.nt.1 | 5605 | 5605.0 | Lung array | 574-633 |
| DEX0477_055.nt.1 | 18496 | 18496.01 | Ovary array | 431-490 |
| DEX0477_055.nt.1 | 5607 | 5607.0 | Lung array | 892-951 |
| DEX0477_055.nt.1 | 20569 | 20569.01 | Ovary array | 574-633 |
| DEX0477_055.nt.1 | 5638 | 5638.0 | Lung array | 1137-1196 |
| DEX0477_055.nt.2 | 5607 | 5607.0 | Lung array | 774-833 |
| DEX0477_055.nt.2 | 5640 | 5640.0 | Lung array | 1528-1587 |
| DEX0477_055.nt.2 | 1187 | 1187.0 | Lung array | 1235-1294 |
| DEX0477_055.nt.2 | 20553 | 20553.02 | Ovary array | 1533-1592 |
| DEX0477_055.nt.2 | 5605 | 5605.0 | Lung array | 574-633 |
| DEX0477_055.nt.2 | 20569 | 20569.01 | Ovary array | 574-633 |
| DEX0477_055.nt.2 | 5624 | 5624.0 | Lung array | 610-669 |
| DEX0477_055.nt.2 | 18496 | 18496.01 | Ovary array | 431-490 |
| DEX0477_055.nt.2 | 5606 | 5606.0 | Lung array | 521-580 |
| DEX0477_055.nt.2 | 5639 | 5639.0 | Lung array | 1533-1592 |
| DEX0477_055.nt.2 | 20563 | 20563.01 | Ovary array | 774-833 |
| DEX0477_055.nt.2 | 1190 | 1190.0 | Lung array | 431-490 |
| DEX0477_055.nt.2 | 5611 | 5611.0 | Lung array | 574-633 |
| DEX0477_055.nt.2 | 20601 | 20601.01 | Ovary array | 1200-1259 |
| DEX0477_055.nt.2 | 20503 | 20503.01 | Ovary array | 574-633 |
| DEX0477_055.nt.2 | 5612 | 5612.0 | Multi-Can array | 512-571 |
| DEX0477_055.nt.2 | 5637 | 5637.0 | Lung array | 1200-1259 |
| DEX0477_055.nt.3 | 5640 | 5640.0 | Lung array | 1405-1464 |
| DEX0477_055.nt.3 | 1187 | 1187.0 | Lung array | 1235-1294 |
| DEX0477_055.nt.3 | 5606 | 5606.0 | Lung array | 521-580 |
| DEX0477_055.nt.3 | 5638 | 5638.0 | Lung array | 1019-1078 |
| DEX0477_055.nt.3 | 20601 | 20601.01 | Ovary array | 1200-1259 |
| DEX0477_055.nt.3 | 5607 | 5607.0 | Lung array | 774-833 |
| DEX0477_055.nt.3 | 20503 | 20503.01 | Ovary array | 574-633 |
| DEX0477_055.nt.3 | 5612 | 5612.0 | Multi-Can array | 512-571 |
| DEX0477_055.nt.3 | 5624 | 5624.0 | Lung array | 610-669 |
| DEX0477_055.nt.3 | 20563 | 20563.01 | Lung array | 774-833 |
| DEX0477_055.nt.3 | 5611 | 5611.0 | Lung array | 574-633 |
| DEX0477_055.nt.3 | 5639 | 5639.0 | Lung array | 1410-1469 |
| DEX0477_055.nt.3 | 1190 | 1190.0 | Lung array | 431-490 |
| DEX0477_055.nt.3 | 18496 | 18496.01 | Ovary array | 431-490 |
| DEX0477_055.nt.3 | 5605 | 5605.0 | Lung array | 574-633 |
| DEX0477_055.nt.3 | 20569 | 20569.01 | Ovary array | 574-633 |
| DEX0477_055.nt.3 | 20553 | 20553.02 | Ovary array | 1410-1469 |
| DEX0477_055.nt.3 | 5637 | 5637.0 | Lung array | 1200-1259 |
| DEX0477_055.nt.4 | 5612 | 5612.0 | Multi-Can array | 512-571 |
| DEX0477_055.nt.4 | 20569 | 20569.01 | Ovary array | 574-633 |
| DEX0477_055.nt.4 | 20553 | 20553.02 | Ovary array | 906-965 |
| DEX0477_055.nt.4 | 5606 | 5606.0 | Lung array | 521-580 |
| DEX0477_055.nt.4 | 20503 | 20503.01 | Ovary array | 574-633 |
| DEX0477_055.nt.4 | 1190 | 1190.0 | Lung array | 431-490 |
| DEX0477_055.nt.4 | 5605 | 5605.0 | Lung array | 574-633 |
| DEX0477_055.nt.4 | 5611 | 5611.0 | Lung array | 574-633 |
| DEX0477_055.nt.4 | 5640 | 5640.0 | Lung array | 901-960 |
| DEX0477_055.nt.4 | 5639 | 5639.0 | Lung array | 906-965 |
| DEX0477_055.nt.4 | 18496 | 18496.01 | Ovary array | 431-490 |
| DEX0477_055.nt.4 | 5624 | 5624.0 | Lung array | 610-669 |
| DEX0477_056.nt.1 | 19014 | 19014.01 | Ovary array | 372-431 |
| DEX0477_056.nt.1 | 3817 | 3817.0 | Lung array | 342-401 |
| DEX0477_056.nt.1 | 3805 | 3805.0 | Lung array | 144-197 |
| DEX0477_056.nt.1 | 3816 | 3816.0 | Lung array | 372-431 |
| DEX0477_057.nt.1 | 33734 | 33734.01 | Prostate1 array | 1586-1645 |
| DEX0477_057.nt.1 | 29011 | 29011.02 | Prostate2 array | 2179-2238 |
| DEX0477_057.nt.1 | 28971 | 28971.0 | Multi-Can array | 2566-2625 |
| DEX0477_057.nt.1 | 28989 | 28989.03 | Prostate2 array | 2179-2238 |
| DEX0477_057.nt.1 | 100797 | 100797.02 | Prostate1 array | 1392-1451 |
| DEX0477_057.nt.1 | 29041 | 29041.02 | Prostate2 array | 2491-2550 |
| DEX0477_057.nt.1 | 25907 | 25907.0 | Colon array | 2383-2442 |
| DEX0477_057.nt.1 | 29077 | 29077.02 | Prostate2 array | 2579-2638 |
| DEX0477_057.nt.1 | 29023 | 29023.02 | Prostate2 array | 2569-2628 |
| DEX0477_057.nt.1 | 28972 | 28972.0 | Multi-Can array | 2352-2411 |
| DEX0477_057.nt.1 | 31890 | 31890.02 | Prostate1 array | 2186-2245 |
| DEX0477_057.nt.1 | 15046 | 15046.01 | Prostate2 array | 114-173 |
| DEX0477_058.nt.1 | 31705 | 31705.0 | Breast array | 1525-1584 |
| DEX0477_058.nt.1 | 35264 | 35264.0 | Colon array | 1545-1604 |
| DEX0477_058.nt.1 | 19316 | 19316.0 | Breast array | 285-344 |
| DEX0477_058.nt.1 | 19330 | 19330.0 | Breast array | 285-344 |
| DEX0477_058.nt.1 | 31066 | 31066.0 | Colon array | 285-344 |
| DEX0477_058.nt.1 | 35265 | 35265.0 | Colon array | 1525-1584 |
| DEX0477_058.nt.1 | 31704 | 31704.0 | Breast array | 1545-1604 |
| DEX0477_058.nt.1 | 30937 | 30937.0 | Colon array | 275-334 |
| DEX0477_058.nt.2 | 31704 | 31704.0 | Breast array | 1561-1620 |
| DEX0477_058.nt.2 | 35265 | 35265.0 | Colon array | 1541-1600 |
| DEX0477_058.nt.2 | 35264 | 35264.0 | Colon array | 1561-1620 |
| DEX0477_058.nt.2 | 31705 | 31705.0 | Breast array | 1541-1600 |
| DEX0477_059.nt.1 | 33732 | 33732.0 | Colon array | 398-457 |
| DEX0477_059.nt.1 | 11217 | 11217.0 | Breast array | 398-457 |
| DEX0477_059.nt.1 | 33733 | 33733.0 | Colon array | 342-401 |
| DEX0477_059.nt.2 | 11217 | 11217.0 | Breast array | 1253-1312 |
| DEX0477_059.nt.2 | 33733 | 33733.0 | Colon array | 1197-1256 |
| DEX0477_059.nt.2 | 33732 | 33732.0 | Colon array | 1253-1312 |
| DEX0477_060.nt.1 | 10664 | 10664.01 | Ovary array | 793-852 |
| DEX0477_060.nt.1 | 35080 | 35080.0 | Colon array | 793-852 |
| DEX0477_060.nt.1 | 31005 | 31005.0 | Breast array | 3587-3646 |
| DEX0477_060.nt.1 | 35081 | 35081.0 | Colon array | 692-751 |
| DEX0477_060.nt.1 | 31004 | 31004.0 | Breast array | 3627-3686 |
| DEX0477_060.nt.1 | 35761 | 35761.0 | Colon array | 2329-2388 |
| DEX0477_060.nt.1 | 17178 | 17178.02 | Ovary array | 2369-2428 |
| DEX0477_060.nt.1 | 23646 | 23646.0 | Breast array | 368-427 |
| DEX0477_060.nt.1 | 35760 | 35760.0 | Colon array | 2369-2428 |
| DEX0477_060.nt.1 | 23647 | 23647.0 | Breast array | 319-378 |
| DEX0477_060.nt.2 | 35081 | 35081.0 | Colon array | 599-658 |
| DEX0477_060.nt.2 | 35760 | 35760.0 | Colon array | 2276-2335 |
| DEX0477_060.nt.2 | 23646 | 23646.0 | Breast array | 275-334 |
| DEX0477_060.nt.2 | 10664 | 10664.01 | Ovary array | 700-759 |
| DEX0477_060.nt.2 | 35761 | 35761.0 | Colon array | 2236-2295 |
| DEX0477_060.nt.2 | 35080 | 35080.0 | Colon array | 700-759 |
| DEX0477_060.nt.2 | 31004 | 31004.0 | Breast array | 3534-3593 |
| DEX0477_060.nt.2 | 17178 | 17178.02 | Ovary array | 2276-2335 |
| DEX0477_060.nt.2 | 31005 | 31005.0 | Breast array | 3494-3553 |
| DEX0477_060.nt.2 | 23647 | 23647.0 | Breast array | 226-285 |
| DEX0477_061.nt.1 | 36404 | 36404.0 | Multi-Can array | 1171-1230 |
| DEX0477_061.nt.1 | 36403 | 36403.0 | Multi-Can array | 1229-1288 |
| DEX0477_061.nt.1 | 22688 | 22688.0 | Breast array | 2685-2744 |
| DEX0477_061.nt.1 | 22689 | 22689.0 | Breast array | 2654-2713 |
| DEX0477_061.nt.2 | 36404 | 36404.0 | Multi-Can array | 1289-1348 |
| DEX0477_061.nt.2 | 36403 | 36403.0 | Multi-Can array | 1347-1406 |
| DEX0477_061.nt.2 | 22689 | 22689.0 | Breast array | 2772-2831 |
| DEX0477_061.nt.2 | 22688 | 22688.0 | Breast array | 2803-2862 |
| DEX0477_062.nt.1 | 28401 | 28401.0 | Colon array | 716-775 |
| DEX0477_062.nt.1 | 22303 | 22303.0 | Breast array | 713-772 |
| DEX0477_062.nt.1 | 6917 | 6917.0 | Lung array | 293-352 |
| DEX0477_062.nt.1 | 6918 | 6918.0 | Lung array | 253-312 |
| DEX0477_062.nt.1 | 22304 | 22304.0 | Breast array | 631-690 |
| DEX0477_062.nt.1 | 28402 | 28402.0 | Colon array | 338-397 |
| DEX0477_063.nt.1 | 28638 | 28638.0 | Colon array | 494-553 |
| DEX0477_063.nt.1 | 12616 | 12616.0 | Breast array | 434-493 |
| DEX0477_063.nt.1 | 33626 | 33626.0 | Breast array | 120-179 |
| DEX0477_063.nt.1 | 12615 | 12615.0 | Breast array | 454-513 |
| DEX0477_063.nt.1 | 28637 | 28637.0 | Colon array | 635-694 |
| DEX0477_063.nt.2 | 28638 | 28638.0 | Colon array | 946-1005 |
| DEX0477_063.nt.2 | 12616 | 12616.0 | Breast array | 886-945 |
| DEX0477_063.nt.2 | 12615 | 12615.0 | Breast array | 906-965 |
| DEX0477_064.nt.1 | 35559 | 35559.0 | Colon array | 329-388 |
| DEX0477_064.nt.1 | 31772 | 31772.0 | Breast array | 329-388 |
| DEX0477_064.nt.1 | 14047 | 14047.0 | Breast array | 338-397 |
| DEX0477_065.nt.1 | 800 | 800.0 | Lung array | 193-252 |
| DEX0477_065.nt.1 | 859 | 859.0 | Lung array | 868-927 |
| DEX0477_065.nt.1 | 4942 | 4942.0 | Lung array | 578-637 |
| DEX0477_065.nt.1 | 793 | 793.0 | Lung array | 818-877 |
| DEX0477_065.nt.1 | 4941 | 4941.0 | Multi-Can array | 818-877 |
| DEX0477_065.nt.1 | 794 | 794.0 | Lung array | 578-637 |
| DEX0477_065.nt.1 | 799 | 799.0 | Lung array | 233-292 |
| DEX0477_065.nt.1 | 860 | 860.0 | Lung array | 848-907 |
| DEX0477_065.nt.2 | 4942 | 4942.0 | Lung array | 601-660 |
| DEX0477_065.nt.2 | 859 | 859.0 | Lung array | 891-950 |
| DEX0477_065.nt.2 | 800 | 800.0 | Lung array | 216-275 |
| DEX0477_065.nt.2 | 4941 | 4941.0 | Multi-Can array | 841-900 |
| DEX0477_065.nt.2 | 799 | 799.0 | Lung array | 256-315 |
| DEX0477_065.nt.2 | 794 | 794.0 | Lung array | 601-660 |
| DEX0477_065.nt.2 | 793 | 793.0 | Lung array | 841-900 |
| DEX0477_065.nt.2 | 860 | 860.0 | Lung array | 871-930 |
| DEX0477_065.nt.3 | 794 | 794.0 | Lung array | 444-503 |
| DEX0477_065.nt.3 | 860 | 860.0 | Lung array | 714-773 |
| DEX0477_065.nt.3 | 4941 | 4941.0 | Multi-Can array | 684-743 |
| DEX0477_065.nt.3 | 4942 | 4942.0 | Lung array | 444-503 |
| DEX0477_065.nt.3 | 793 | 793.0 | Lung array | 684-743 |
| DEX0477_065.nt.3 | 859 | 859.0 | Lung array | 734-793 |
| DEX0477_066.nt.1 | 4942 | 4942.0 | Lung array | 578-637 |
| DEX0477_066.nt.1 | 793 | 793.0 | Lung array | 818-877 |
| DEX0477_066.nt.1 | 859 | 859.0 | Lung array | 868-927 |
| DEX0477_066.nt.1 | 4941 | 4941.0 | Multi-Can array | 818-877 |
| DEX0477_066.nt.1 | 800 | 800.0 | Lung array | 193-252 |
| DEX0477_066.nt.1 | 799 | 799.0 | Lung array | 233-292 |
| DEX0477_066.nt.1 | 860 | 860.0 | Lung array | 848-907 |
| DEX0477_066.nt.1 | 794 | 794.0 | Lung array | 578-637 |
| DEX0477_066.nt.2 | 859 | 859.0 | Lung array | 734-793 |
| DEX0477_066.nt.2 | 793 | 793.0 | Lung array | 684-743 |
| DEX0477_066.nt.2 | 4941 | 4941.0 | Multi-Can array | 684-743 |
| DEX0477_066.nt.2 | 4942 | 4942.0 | Lung array | 444-503 |
| DEX0477_066.nt.2 | 794 | 794.0 | Lung array | 444-503 |
| DEX0477_066.nt.2 | 860 | 860.0 | Lung array | 714-773 |
| DEX0477_067.nt.1 | 4788 | 4788.0 | Lung array | 336-395 |
| DEX0477_067.nt.1 | 36348 | 36348.0 | Colon array | 700-759 |
| DEX0477_067.nt.1 | 14791 | 14791.0 | Breast array | 695-754 |
| DEX0477_067.nt.1 | 4787 | 4787.0 | Lung array | 346-405 |
| DEX0477_068.nt.1 | 4480 | 4480.0 | Lung array | 499-558 |
| DEX0477_068.nt.1 | 5539 | 5539.0 | Multi-Can array | 499-558 |
| DEX0477_069.nt.1 | 4894 | 4894.0 | Lung array | 649-701 |
| DEX0477_069.nt.1 | 34086 | 34086.0 | Colon array | 690-749 |
| DEX0477_069.nt.1 | 4893 | 4893.0 | Lung array | 690-749 |
| DEX0477_069.nt.1 | 27947 | 27947.0 | Breast array | 670-729 |
| DEX0477_069.nt.1 | 27948 | 27948.0 | Breast array | 501-560 |
| DEX0477_070.nt.1 | 3744 | 3744.0 | Lung array | 128-180 |
| DEX0477_070.nt.1 | 16104 | 16104.0 | Breast array | 679-738 |
| DEX0477_070.nt.1 | 3745 | 3745.0 | Multi-Can array | 112-171 |
| DEX0477_071.nt.1 | 16463 | 16463.0 | Breast array | 223-282 |
| DEX0477_071.nt.1 | 4958 | 4958.0 | Lung array | 250-309 |
| DEX0477_071.nt.1 | 4957 | 4957.0 | Lung array | 290-349 |
| DEX0477_071.nt.1 | 16462 | 16462.0 | Breast array | 263-322 |
| DEX0477_071.nt.2 | 4958 | 4958.0 | Lung array | 299-358 |
| DEX0477_071.nt.2 | 4957 | 4957.0 | Lung array | 339-398 |
| DEX0477_071.nt.2 | 16462 | 16462.0 | Breast array | 312-371 |
| DEX0477_071.nt.2 | 16463 | 16463.0 | Breast array | 272-331 |
| DEX0477_072.nt.1 | 3292 | 3292.0 | Lung array | 2613-2672 |
| DEX0477_072.nt.1 | 18688 | 18688.0 | Breast array | 2586-2645 |
| DEX0477_072.nt.1 | 3293 | 3293.0 | Lung array | 2530-2589 |
| DEX0477_072.nt.2 | 18688 | 18688.0 | Breast array | 1464-1523 |
| DEX0477_072.nt.2 | 3292 | 3292.0 | Lung array | 1491-1550 |
| DEX0477_073.nt.1 | 589 | 589.0 | Lung array | 2841-2900 |
| DEX0477_073.nt.1 | 33760 | 33760.0 | Colon array | 2845-2904 |
| DEX0477_073.nt.1 | 590 | 590.0 | Lung array | 2839-2898 |
| DEX0477_073.nt.2 | 589 | 589.0 | Lung array | 1373-1432 |
| DEX0477_073.nt.2 | 33760 | 33760.0 | Colon array | 1377-1436 |
| DEX0477_074.nt.1 | 590 | 590.0 | Lung array | 2432-2491 |
| DEX0477_074.nt.1 | 33760 | 33760.0 | Colon array | 2438-2497 |
| DEX0477_074.nt.1 | 589 | 589.0 | Lung array | 2434-2493 |
| DEX0477_075.nt.1 | 30637 | 30637.0 | Colon array | 168-227 |
| DEX0477_075.nt.1 | 30638 | 30638.0 | Colon array | 126-185 |
| DEX0477_075.nt.1 | 5835 | 5835.0 | Lung array | 168-227 |
| DEX0477_075.nt.1 | 5836 | 5836.0 | Lung array | 126-185 |
| DEX0477_076.nt.1 | 1383 | 1383.0 | Multi-Can array | 3229-3288 |
| DEX0477_076.nt.1 | 5317 | 5317.0 | Lung array | 3223-3282 |
| DEX0477_076.nt.1 | 1379 | 1379.0 | Lung array | 2203-2262 |
| DEX0477_076.nt.1 | 1354 | 1354.0 | Lung array | 1401-1460 |
| DEX0477_076.nt.1 | 1336 | 1336.0 | Lung array | 2283-2342 |
| DEX0477_076.nt.1 | 5318 | 5318.0 | Lung array | 3098-3157 |
| DEX0477_076.nt.1 | 1355 | 1355.0 | Lung array | 1311-1370 |
| DEX0477_076.nt.1 | 3231 | 3231.0 | Lung array | 2559-2611 |
| DEX0477_076.nt.1 | 1337 | 1337.0 | Lung array | 2273-2332 |
| DEX0477_076.nt.1 | 1378 | 1378.0 | Lung array | 2233-2292 |
| DEX0477_076.nt.1 | 1382 | 1382.0 | Lung array | 3382-3441 |
| DEX0477_077.nt.1 | 2137 | 2137.0 | Lung array | 240-295 |
| DEX0477_077.nt.1 | 34002 | 34002.0 | Colon array | 1079-1138 |
| DEX0477_077.nt.1 | 2136 | 2136.0 | Lung array | 283-339 |
| DEX0477_077.nt.1 | 38324 | 38324.0 | Colon array | 240-295 |
| DEX0477_077.nt.1 | 38323 | 38323.0 | Colon array | 283-339 |
| DEX0477_077.nt.1 | 34003 | 34003.0 | Colon array | 1034-1093 |
| DEX0477_078.nt.1 | 5481 | 5481.0 | Lung array | 783-842 |
| DEX0477_078.nt.1 | 5538 | 5538.0 | Lung array | 120-179 |
| DEX0477_078.nt.1 | 22483 | 22483.02 | Ovary array | 1724-1783 |
| DEX0477_078.nt.1 | 8313 | 8313.0 | Colon array | 1730-1781 |
| DEX0477_078.nt.1 | 5483 | 5483.0 | Lung array | 222-281 |
| DEX0477_078.nt.1 | 5482 | 5482.0 | Lung array | 771-830 |
| DEX0477_078.nt.1 | 422 | 422.0 | Lung array | 1119-1178 |
| DEX0477_078.nt.1 | 20711 | 20711.0 | Breast array | 1724-1783 |
| DEX0477_078.nt.1 | 8312 | 8312.0 | Colon array | 1805-1864 |
| DEX0477_078.nt.1 | 5484 | 5484.0 | Lung array | 215-274 |
| DEX0477_079.nt.1 | 10993 | 10993.0 | Colon array | 427-486 |
| DEX0477_079.nt.1 | 3717 | 3717.0 | Lung array | 659-718 |
| DEX0477_079.nt.1 | 10992 | 10992.0 | Colon array | 445-504 |
| DEX0477_079.nt.1 | 3716 | 3716.0 | Lung array | 699-758 |
| DEX0477_080.nt.1 | 19274 | 19274.02 | Ovary array | 356-415 |

### Example 2b

### Relative Quantitation of Gene Expression

[0604] Real-Time quantitative PCR with fluorescent Taqman® probes is a quantitation detection system utilizing the 5′-3′ nuclease activity of Taq DNA polymerase. The method uses an internal fluorescent oligonucleotide probe (Taqman®) labeled with a 5′ reporter dye and a downstream, 3′ quencher dye. During PCR, the 5′-3′ nuclease activity of Taq DNA polymerase releases the reporter whose fluorescence can then be detected by the laser detector of the Model 7700 Sequence Detection System (PE Applied Biosystems, Foster City, Calif., USA). Amplification of an endogenous control is used to standardize the amount of sample RNA added to the reaction and normalize for Reverse Transcriptase. (RT) efficiency. Either cyclophilin, glyceraldehyde-3-phosphate dehydrogenase (GAPDH), ATPase, or 18S ribosomal RNA (rRNA) is used as this endogenous control. To calculate relative quantitation between all the samples studied, the target RNA levels for one sample were used as the basis for comparative results (calibrator). Quantitation relative to the “calibrator” can be obtained using the comparative method (User Bulletin #2: ABI PRISM 7700 Sequence Detection System).

[0605] The tissue distribution and the level of the target gene are evaluated for every sample in normal and cancer tissues. Total RNA is extracted from normal tissues, cancer tissues, and from cancers and the corresponding matched adjacent tissues. Subsequently, first strand cDNA is prepared with reverse transcriptase and the polymerase chain reaction is done using primers and Taqman® probes specific to each target gene. The results are analyzed using the ABI PRISM 7700 Sequence Detector. The absolute numbers are relative levels of expression of the target gene in a particular tissue compared to the calibrator tissue.

[0606] One of ordinary skill can design appropriate primers. The relative levels of expression of the CaSNA versus normal tissues and other cancer tissues can then be determined. All the values are compared to the calibrator. Normal RNA samples are commercially available pools, originated by pooling samples of a particular tissue from different individuals.

[0607] The relative levels of expression of the CaSNA in pairs of matched samples may also be determined. A matched pair is formed by mRNA from the cancer sample for a particular tissue and mRNA from the normal adjacent sample for that same tissue from the same individual. All the values are compared to the calibrator.

[0608] In the analysis of matching samples, the CaSNAs show a high degree of tissue specificity for the tissue of interest. These results confirm the tissue specificity results obtained with normal pooled samples. Further, the level of mRNA expression in cancer samples and the isogenic normal adjacent tissue from the same individual are compared. This comparison provides an indication of specificity for the cancer state (e.g. higher levels of mRNA expression in the cancer sample compared to the normal adjacent).

[0609] Information on the samples tested in the QPCR experiments below include the Sample ID (Smpl ID), Organ, Tissue Type (Tiss Type), Diagnosis (DIAG), Disease Detail, and Stage or Grade (STG or GRD) in following table.

| Sample | | Tissue | | | Stage or |
|---|---|---|---|---|---|
| ID | Organ | Type | Diagnosis | Disease Detail | Grade |
| 101XB | Prostate | CAN | | adeno, | 2 + 3 = 5 |
| | | | | localized | |
| 101XB | Prostate | NAT | | NAT | |
| 125XB | Prostate | CAN | Adenocarcinoma | Adenocarcinoma | Gleason's |
| | | | | | 3 + 3 |
| 125XB | Prostate | NAT | | | |
| 12B | Prostate | CAN | | Prostate tumor | Gleason's |
| | | | | | 2 + 2 = 4 |
| 12B | Prostate | NAT | | NAT | |
| 65XB | Prostate | CAN | Adenocarcinoma | adenocarcinoma | 3 + 4 = 7 |
| 65XB | Prostate | NAT | | NL | |
| 78XB | Prostate | CAN | Adenocarcinoma | adenocarcinoma | 3 + 4 |
| 78XB | Prostate | NAT | | NL | |
| 84XB | Prostate | CAN | Adenocarcinoma | adenocarcinoma | 2 + 3 |
| 84XB | Prostate | NAT | | NL | |
| 23B | Prostate | CAN | | Prostate tumor | Gleason's |
| | | | | | 3 + 4 |
| 23B | Prostate | NAT | | NAT | |
| 675P | Prostate | CAN | Adenocarcinoma | adenocarcinoma | |
| 675P | Prostate | NAT | | Normal | |
| 958P | Prostate | CAN | Adenocarcinoma | Adenocarcinoma | T2C, NO, |
| | | | | | MX |
| 958P | Prostate | NAT | | NAT | |
| 855P | Prostate | BPH | | BPH | |
| 276P | Prostate | BPH | | BPH | |
| 767B | Prostate | BPH | | prostate BPH | |
| 263C | Prostate | BPH | | BPH | |
| 10R | Prostate | PROST | | active chronic | T0, N0, M0 |
| | | | | prostatitis | |
| 20R | Prostate | PROST | | PROSTATITIS | |
| 030B | Urinary | CAN | Carcinoma | invasive | Stage |
| | Bladder | | | Carcinoma, poorly | III, Grade 3 |
| | | | | differentiated | |
| 030B | Urinary | NAT | | NAT | |
| | Bladder | | | | |
| 520B | Urinary | CAN | Sarcomatoid | Sarcomatoid | |
| | Bladder | | transitional | transitional | |
| | | | cell carcinoma | cell carcinoma | |
| 520B | Urinary | NAT | | NAT | |
| | Bladder | | | | |
| TR17 | Urinary | CAN | Carcinoma | transitional | StageII/GradeIII |
| | Bladder | | | cell carcinoma | |
| TR17 | Urinary | NAT | | NAT | |
| | Bladder | | | | |
| 401C | Colon | CAN | Adenocarcinoma | Adenocarcinoma | Stage III |
| | | | | of ascending | |
| | | | | colon and | |
| | | | | cecum | |
| 401C | Colon | NAT | | NAT | |
| AS43 | Colon | CAN | Adenocarcinoma | malignant | |
| AS43 | Colon | NAT | Adenocarcinoma | NAT | |
| AS98 | Colon | CAN | Adenocarcinoma | Moderately to | Duke's C |
| | | | | poorly | |
| | | | | differentiated | |
| | | | | adenocarcinoma | |
| AS98 | Colon | NAT | | NAT | |
| CM12 | Colon | CAN | | T | Stage D |
| CM12 | Colon | NAT | Adenocarcinoma | Nat | |
| DC19 | Colon | CAN | | T | Stage B |
| DC19 | Colon | NAT | | NL | |
| RC01 | Colon | CAN | Cancer | | Stage IV |
| RC01 | Colon | NAT | | NAT | |
| RS53 | Colon | CAN | Adenocarcinoma | moderately | |
| | | | | differentiated | |
| | | | | adenocarcinoma | |
| RS53 | Colon | NAT | Adenocarcinoma | NAT | |
| SG27 | Colon | CAN | | malig | Stage B |
| SG27 | Colon | NAT | | NAT | |
| TX01 | Colon | CAN | Adenocarcinoma | Moderately | Stage II; |
| | | | | differentiated | T3NoMo |
| | | | | adenocarcinoma | |
| | | | | of cecum | |
| TX01 | Colon | NAT | | NAT | |
| KS52 | Cervix | CAN | Squamous cell | Keratinizing | IIIB, well |
| | | | carcinoma | Squamous Cell | diff. G1; |
| | | | | Carcinoma | T3bNxM0 |
| KS52 | Cervix | NAT | | NAT | |
| NK23 | Cervix | CAN | | Nonkeratinizing | FIGO IIIB, |
| | | | | Large Cell | undiff. |
| | | | | | G4; |
| | | | | | T3bNxM0 |
| NK23 | Cervix | NAT | | NAT | |
| NKS54 | Cervix | CAN | Squamous cell | Nonkeratinizing | IIB, mod |
| | | | carcinoma | Squamous | diff. G2; |
| | | | | Cell Carcinoma | T2bNxM0 |
| NKS54 | Cervix | NAT | | NAT | |
| NKS55 | Cervix | CAN | Squamous cell | Nonkeratinizing | IIIB, Mod |
| | | | carcinoma | Squamous | diff. G2; |
| | | | | Cell Carcinoma | T3bNxM0 |
| NKS55 | Cervix | NAT | | NAT | |
| NKS81 | Cervix | CAN | Squamous cell | large cell | IIB |
| | | | carcinoma | nonkeratinizing | |
| | | | | sq carc, | |
| | | | | IIB, | |
| | | | | moderately | |
| | | | | diff | |
| NKS81 | Cervix | NAT | | NAT | |
| 10479 | Endometrium | CAN | | malignant | T?, Nx, M1 |
| | | | | mixed | |
| | | | | mullerian | |
| | | | | tumor | |
| 10479 | Endometrium | NAT | | NAT | |
| 28XA | Endometrium | CAN | Endometrial | malignant | II/III |
| | | | adenocarcinoma | | |
| 28XA | Endometrium | NAT | | NAT | II/III |
| 8XA | Endometrium | CAN | mod. diff, | | |
| | | | invasive, | | |
| | | | squamous | | |
| | | | differentiation, | | |
| | | | FIGO-II | | |
| 8XA | Endometrium | NAT | | NAT | |
| 106XD | Kidney | CAN | Renal cell | renal cell | 3 |
| | | | carcinoma | carcinoma, | |
| | | | | clear cell, | |
| | | | | localized | |
| 106XD | Kidney | NAT | | NL | |
| 107XD | Kidney | CAN | Renal cell | renal cell | G III |
| | | | carcinoma | carcinoma, | |
| | | | | clear cell, | |
| | | | | with | |
| | | | | metastatic | |
| 107XD | Kidney | NAT | | NL | |
| 109XD | Kidney | CAN | | Malignant | G III |
| 109XD | Kidney | NAT | | NL | |
| 10XD | Kidney | CAN | Renal cell | renal cell | 3 |
| | | | carcinoma | carcinoma, | |
| | | | | clear cell, | |
| | | | | localized, | |
| | | | | grade 2-3 | |
| 10XD | Kidney | NAT | | NL | |
| 22K | Kidney | CAN | Renal cell | Renal cell | G2, Mod. |
| | | | carcinoma | carcinoma | Diff. |
| 22K | Kidney | NAT | | NAT | |
| 15XA | Liver | CAN | | Sarcoma, Retroperitoneal | Grade-2 |
| | | | | Tumor | |
| 15XA | Liver | NAT | | CA | St. I, G4 |
| 174L | Liver | CAN | Hepatocellular | Moderate to | |
| | | | carcinoma | well | |
| | | | | differentiated | |
| | | | | hepatocellular | |
| | | | | carcinoma | |
| 174L | Liver | NAT | Hepatocellular | NAT | |
| | | | carcinoma | | |
| 187L | Liver | CAN | Adenocarcinoma | Metastatic | Liver |
| | | | | Adenocarcinoma | (Gallbladder) |
| 187L | Liver | NAT | | NAT | |
| 205L | Lung | CAN | Adenocarcinoma | poorly | T2, N1, Mx |
| | | | | differentiated | |
| | | | | adenocarcinoma | |
| 205L | Lung | NAT | | NAT | |
| 315L | Lung | CAN | Squamous cell | | |
| | | | carcinoma | | |
| 315L | Lung | NAT | Adenocarcinoma | NAT | |
| 507L | Lung | CAN | Bronchioloalveolar | bronchioalveolar | Stage IB, |
| | | | carcinoma | carcinoma | G1, well |
| | | | | | diff. |
| 507L | Lung | NAT | | NAT | |
| 528L | Lung | CAN | Adenocarcinoma | Adenocarcinoma | St. IV, T2N0 |
| | | | | | M1, |
| | | | | | infiltrating |
| | | | | | poorly |
| | | | | | diff. |
| 528L | Lung | NAT | | NAT | |
| 3837L | Lung | CAN | Squamous cell | Squamous cell | T2, N0, M0 |
| | | | carcinoma | carcinoma | |
| 8837L | Lung | NAT | | NAT | |
| AC11 | Lung | CAN | Adenocarcinoma | poorly | T2, N2, M1 |
| | | | | differentiated | |
| | | | | adenocarcinoma | |
| AC11 | Lung | NAT | | NAT | |
| AC39 | Lung | CAN | Adenocarcinoma | intermediate | T2, N2, Mx |
| | | | | grade | |
| | | | | adnocarcinoma | |
| AC39 | Lung | NAT | | NAT | |
| SQ80 | Lung | CAN | Squamous cell | poorly | T1, N1, M0 |
| | | | carcinoma | differentiated | |
| | | | | squamous cell | |
| | | | | carcinoma | |
| SQ80 | Lung | NAT | | NAT | |
| SQ81 | Lung | CAN | Squamous cell | poorly | T3, N1, Mx |
| | | | carcinoma | differentiated | |
| | | | | squamous | |
| | | | | carcinoma | |
| SQ81 | Lung | NAT | | NAT | |
| 19DN | Mammary | CAN | Invasive | Invasive | G3, Stage |
| | | | ductal | ductal | IIA; |
| | | | carcinoma | carcinoma | T2N0M0 |
| 19DN | Mammary | NAT | | NAT | |
| 42DN | Mammary | CAN | Invasive | Invasive | T3aN1M0 |
| | | | ductal | Ductal | IIIA, G3 |
| | | | carcinoma | Carcinoma | |
| 42DN | Mammary | NAT | | NAT | |
| 517 | Mammary | CAN | Infiltrating | Infiltrating | St. IIA, |
| | | | ductal | ductal | G3 |
| | | | carcinoma | carcinoma | |
| 517 | Mammary | NAT | | NAT | |
| 781M | Mammary | CAN | Invasive | | Architectural |
| | | | ductal | | grade- |
| | | | carcinoma | | 3/3, Nuclear |
| | | | | | grade- |
| | | | | | 3/3 |
| 781M | Mammary | NAT | | NAT | |
| 869M | Mammary | CAN | Invasive | Invasive | Stage IIA |
| | | | carcinoma | Carcinoma | G1; T2NoMo |
| 869M | Mammary | NAT | | NAT | |
| 976M | Mammary | CAN | Invasive | Invasive | T2N1M0 |
| | | | ductal | Ductal | (Stage 2B |
| | | | carcinoma | Carcinoma | Grade 2-3) |
| 976M | Mammary | NAT | | NAT | |
| S570 | Mammary | CAN | Carcinoma | Carcinoma | Stage |
| | | | | | IIA; T1N1Mo |
| S570 | Mammary | NAT | | NAT | |
| S699 | Mammary | CAN | Invasive | Invasive | Stage IIB |
| | | | lobular | Lobular | G1; T2N1Mo |
| | | | carcinoma | Carcinoma | |
| S699 | Mammary | NAT | | NAT | |
| S997 | Mammary | CAN | Invasive | Invasive | Stage IIB |
| | | | ductal | Ductal | G3; T2N1Mo |
| | | | carcinoma | Carcinoma | |
| S997 | Mammary | NAT | | NAT | |
| G021 | Ovary | CAN | Carcinoma | St. IIIC, | Stage- |
| | | | | poorly diff. | IIIC, |
| | | | | | poorly |
| | | | | | diff. |
| G021 | Ovary | NAT | | NAT | |
| 1005O | Ovary | CAN | | papillary | 3 |
| | | | | serous and | |
| | | | | endometrioid | |
| | | | | ovarian | |
| | | | | carcinoma, | |
| | | | | concurrent | |
| | | | | metastatic | |
| | | | | breast cancer | |
| 1040O | Ovary | CAN | | papillary | |
| | | | | serous adeno, | |
| | | | | metastatic | |
| 105O | Ovary | CAN | | Papillary | Stage IC |
| | | | | Serous | G0; |
| | | | | Carcinoma with | T1cN0M0 |
| | | | | Focal Mucinous | |
| | | | | Differentiation | |
| 130X | Ovary | CAN | | Ovarian cancer | |
| 718O | Ovary | CAN | Adenocarcinoma | malignant | IIIC |
| | | | | tumor | |
| A1B | Ovary | CAN | Adenocarcinoma | CA | |
| 71XL | Pancreas | CAN | | villous | localized |
| | | | | adenoma with | |
| | | | | paneth cell | |
| | | | | metaplasia | |
| 71XL | Pancreas | NAT | | NL | |
| 82XP | Pancreas | CAN | | serious | |
| | | | | cystadenoma | |
| 82XP | Pancreas | NAT | | NL | |
| 92X | Pancreas | CAN | Ductal | ductal | mod to |
| | | | adenocarcinoma | adenocarcinoma | focally |
| | | | | | poorly |
| | | | | | diff. |
| 92X | Pancreas | NAT | | NL | |
| 39A | Skin | CAN | | CA | St. II |
| 39A | Skin | NAT | | CA | St. II |
| 287S | Skin | CAN | Squamous cell | Invasive | Moderately |
| | | | carcinoma | Keratinizing | Differentiated |
| | | | | Squamous Cell | |
| | | | | Carcinoma | |
| 287S | Skin | NAT | | NAT | |
| 669S | Skin | CAN | Melanoma | Nodular | |
| | | | | malignant | |
| | | | | melanoma | |
| 669S | Skin | NAT | | NAT | |
| 171S | Small | CAN | Adenocarcinoma | Moderately | |
| | Intestine | | | differentiated | |
| | | | | Adenocarcinoma, | |
| | | | | invasive | |
| 171S | Small | NAT | | NAT | |
| | Intestine | | | | |
| H89 | Small | CAN | Adenocarcinoma | Adenocarcimoa | 80% tumor, |
| | Intestine | | | | 50% |
| | | | | | necrosis, |
| | | | | | moderately |
| | | | | | differentiated, |
| | | | | | G2-3, |
| | | | | | T3N1MX |
| H89 | Small | NAT | Adenocarcinoma | NAT | |
| | Intestine | | | | |
| 20SM | Small | CAN | Adenocarcinoma | Adenocarcinoma, | St. IV, |
| | Intestine | | | metastic to | poorly |
| | | | | lung & liver | diff. |
| 20SM | Small | NAT | | NAT | |
| | Intestine | | | | |
| 88S | Stomach | CAN | Adenocarcinoma | Mucinous | T3N1M0, |
| | | | | adenocarcinoma | St. IIIA |
| 88S | Stomach | NAT | | NAT | |
| 261S | Stomach | CAN | Signet-ring | Signet-ring | Stage |
| | | | cell carcinoma | cell carcinoma | IIIA, |
| | | | | | T3N1M0 |
| 261S | Stomach | NAT | | NAT | |
| 288S | Stomach | CAN | Adenocarcinoma | Infiltrating | Moderately |
| | | | | Adneocarcinoma | Differentiated |
| 288S | Stomach | NAT | | NAT | |
| AC93 | Stomach | CAN | Adenocarcinoma | Adenocarcinoma | St. IV, |
| or | | | | | G4, |
| 509L | | | | | T4N3M0, |
| | | | | | poorly |
| | | | | | diff. |
| AC93 | Stomach | NAT | | NAT | |
| or | | | | | |
| 509L | | | | | |
| 39X | Testes | CAN | | CA | |
| 39X | Testes | NAT | | NAT | |
| 647T | Testes | CAN | Teratocarcinoma | Teratocarcinoma | Stage IA |
| 647T | Testes | NAT | Teratocarcinoma | NAT | |
| 663T | Testes | CAN | Teratocarcinoma | Teratocarcinoma | |
| 663T | Testes | NAT | | NAT | |
| 56T | Thyroid | CAN | Papillary | Papillary | St. III; |
| | Gland | | carcinoma | Carcinoma | T4N1M0 |
| 56T | Thyroid | NAT | | NAT | |
| | Gland | | | | |
| 143N | Thyroid | CAN | Follicular | Follicular | |
| | Gland | | carcinoma | Carcinoma | |
| 143N | Thyroid | NAT | | NAT | |
| | Gland | | | | |
| 270T | Thyroid | CAN | | CA | |
| | Gland | | | | |
| 270T | Thyroid | NAT | | NAT | |
| | Gland | | | | |
| 135XO | Uterus | CAN | | Uterus normal | |
| 135XO | Uterus | NAT | | Uterus tumor | |
| 85XU | Uterus | CAN | | endometrial | I |
| | | | | carcinoma | |
| 85XU | Uterus | NAT | | NL | |
| 355 | Mammary | CAN | Invasive | Invasive | Stage IIB |
| | | | lobular | lobular | |
| | | | carcinoma | carcinoma | |
| 355 | | NAT | NAT | | |
| B011X | Mammary | CAN | | Cancer | |
| B011X | Mammary | NAT | | NAT | |
| S621 | Mammary | CAN | Infiltrating | Infiltrating | G3; T1NxMx |
| | | | ductal | Duct | |
| | | | carcinoma | Adenocarcinoma | |
| S621 | Mammary | NAT | | NAT | |
| S516 | Mammary | CAN | Infiltrating | Infiltrating | Stage I |
| | | | ductal | Ductal | G2; T1NoMo |
| | | | carcinoma | Carcinoma with | |
| | | | | Lymphatic | |
| | | | | Invasion | |
| S516 | Mammary | NAT | | NAT | |
| 522 | Mammary | CAN | Infiltrating | Infiltrating | G III |
| | | | ductal | ductal | |
| | | | carcinoma | carcinoma | |
| 522 | Mammary | NAT | | NAT | |
| 76DN | Mammary | CAN | | Invasive | G3, poorly |
| | | | | ductal | diff. |
| | | | | carcinoma | |
| 76DN | Mammary | NAT | | NAT | |
| AS12 | Colon | CAN | | T | StageB |
| AS12 | Colon | NAT | | NL | |
| AS46 | Colon | CAN | | malignant | T3N1MX |
| AS46 | Colon | NAT | | NAT | |
| B34 | Colon | CAN | Adenocarcinoma | | |
| B34 | Colon | NAT | Adenocarcinoma | NAT | |
| CM67 | Colon | CAN | Adenocarcinoma | Adenocarcinoma | Stage II |
| | | | | of cecum, | |
| | | | | Moderately | |
| | | | | differentiated | |
| CM67 | Colon | NAT | | NAT | |
| DC22 | Colon | CAN | | Cancer | |
| DC22 | Colon | NAT | | NAT | |
| TX89 | Colon | CAN | Adenocarcinoma | Adenocarcinoma | Stave IV |
| | | | | of Transverse | |
| | | | | Colon | |
| TX89 | Colon | NAT | | NAT | |
| NKS25 | Cervix | CAN | | | |
| NKS25 | Cervix | NAT | | NAT | |
| NKS18 | Cervix | CAN | Squamous cell | Nonkeratinizing | GII |
| | | | carcinoma | squamous | |
| | | | | cell carcinoma | |
| NKS18 | Cervix | NAT | | NAT | |
| 12XD | Kidney | CAN | Renal cell | Left renal | |
| | | | carcinoma | cell carcinoma | |
| 12XD | Kidney | NAT | | NAT | |
| 15XA | Kidney | | | Sarcoma, Retroperitoneal | Grade-2 |
| | | | | Tumor | |
| 77X | Pancreas | CAN | Hepatic | Hepatic | |
| | | | adenoma | adenoma | |
| 77X | Pancreas | NAT | | NL | |
| 451O | Ovary | NRM | | Normal Tissue | |
| 982L | Lung | CAN | Adenocarcinoma | poorly | T1, N0, Mx |
| | | | | differentiated | |
| | | | | adenocarcinoma | |
| 982L | Lung | NAT | | NAT | |
| AC69 | Lung | CAN | Adenocarcinoma | adenocarcinoma | metastatic, |
| | | | | | mod. |
| | | | | | Diff |
| AC69 | Lung | NAT | | NL | |
| AC90 | Lung | CAN | Adenocarcinoma | infiltrating | T3, N0, Mx |
| | | | | moderately | |
| | | | | differentiated | |
| | | | | adenocarcinoma | |
| AC90 | Lung | NAT | | NAT | |
| 489L | Lung | CAN | Squamous cell | Invasive | |
| | | | carcinoma | | |
| 489L | Lung | NAT | Squamous cell | NAT, Invasive | |
| | | | carcinoma | | |
| SQ16 | Lung | CAN | Squamous cell | poorly | T2, N1, Mx |
| | | | carcinoma | differentiated | |
| | | | | squamous cell | |
| | | | | carcinoma | |
| SQ16 | Lung | NAT | | NAT | |
| SQ79 | Lung | CAN | Small cell | poorly | T2, N0, Mx |
| | | | adenocarcinoma | differentiated | |
| | | | | small cell | |
| | | | | adenocarcinoma | |
| SQ79 | Lung | NAT | | NAT | |
| B69 | Blood | NRM | | Normal | |
| B72 | Blood | NRM | | Normal | |
| B73 | Blood | NRM | | Normal | |
| B75 | Blood | NRM | | Normal | |
| B1 | Blood | NRM | | Normal | |
| B3 | Blood | NRM | | Normal | |
| B5 | Blood | NRM | | Normal | |
| B6 | Blood | NRM | | Normal | |
| B11 | Blood | NRM | | Normal | |
| 982B | Blood | NRM | | Normal | |
| 48AD | Adrenal | NRM | | Normal | |
| | Gland | | | | |
| 10BR | Brain | NRM | | Normal | |
| 01CL | Colon | NRM | | Normal | |
| 06CV | Cervix | NRM | | Normal | |
| 01ES | Esophagus | NRM | | Normal | |
| 46HR | Heart | NRM | | Normal | |
| 00HR | Human | CAN | CAN | Cancer pool | |
| | Reference | | | | |
| 55KD | Kidney | NRM | | Normal | |
| 89LV | Liver | NRM | | Normal | |
| 90LN | Lung | NRM | | Normal | |
| 01MA | Mammary | NRM | | Normal | |
| 84MU | Skeletal | NRM | | Normal | |
| | Muscle | | | | |
| 3APV | Ovary | NRM | | Normal | |
| C004 | Ovary | NRM | | NL | |
| 206I | Ovary | NRM | | NL | |
| 515O | Ovary | NRM | | Normal | |
| 18GA | Ovary | NRM | | NL | |
| 337O | Ovary | NRM | | Normal | |
| 123O | Ovary | NRM | | Normal | |
| C177 | Ovary | NRM | | several fluid | |
| | | | | filled cysts | |
| 40G | Ovary | NRM | | NL | |
| 04PA | Pancreas | NRM | | Normal | |
| 59PL | Placenta | NRM | | Normal | |
| 09PR | Prostate | NRM | | Normal | |
| 21RC | Rectum | NRM | | Normal | |
| 59SM | Small | NRM | | Normal | |
| | Intestine | | | | |
| 7GSP | Spleen | NRM | | Normal | |
| 09ST | Stomach | NRM | | Normal | |
| 4GTS | Testes | NRM | | Normal | |
| 99TM | Thymus | NRM | | Normal | |
| | Gland | | | | |
| 16TR | Trachea | NRM | | Normal | |
| 57UT | Uterus | NRM | | Normal | |

DEX0477_{—}001.nt.2 (Pro177)

[0610] The relative expression level of Pro 177, also known as Pro108v1, in various tissue samples is included below. Tissue samples include 79 pairs of matching samples, 7 non matched cancer samples, and 37 normal samples, all from various tissues annotated in the table. A matching pair is formed by mRNA from the cancer sample for a particular tissue and mRNA from the normal adjacent sample for that same tissue from the same individual. Of the normal samples 6 were blood samples which measured the expression levels in blood cells. Additionally, 2 prostatitis, and 4 Benign Prostatic Hyperplasia (BPH) samples are included. All the values are compared to normal breast sample MAM01MA (calibrator).

[0611] The table below contains the relative expression level values for the sample as compared to the calibrator. The table includes the Sample Name, Tissue type, and expression level values for the following samples: Cancer (CAN), Normal Adjacent Tissue (NAT), Normal Tissue (NRM), Benign Prostatic Hyperplasia (BPH), and Prostatitis (PROST).

| Sample ID | CAN | NAT | NRM | BPH | PROST |
|---|---|---|---|---|---|
| PRO101XB | 1.49 | 0.53 | | | |
| PRO65XB | 20.23 | 2.02 | | | |
| PRO78XB | 1.00 | 0.28 | | | |
| PRO84XB | 54.10 | 6.40 | | | |
| PRO125XB | 6.49 | 0.74 | | | |
| PRO12B | 0.26 | 0.20 | | | |
| PRO23B | 8.93 | 8.86 | | | |
| PRO65XB | 20.23 | 2.02 | | | |
| PRO675P | 43.08 | 2.66 | | | |
| PRO84XB | 54.10 | 6.40 | | | |
| PRO958P | 8.93 | 5.30 | | | |
| PRO263C | | | | 10.59 | |
| PRO276P | | | | 3.65 | |
| PRO767B | | | | 3.46 | |
| PRO855P | | | | 12.22 | |
| PRO10R | | | | | 17.44 |
| PRO20R | | | | | 5.16 |
| BLD030B | 1.57 | 2.56 | | | |
| BLD520B | 1.26 | 0.97 | | | |
| BLDTR17 | 1.05 | 0.17 | | | |
| CLN401C | 0.27 | 0.29 | | | |
| CLNAS43 | 1.09 | 0.32 | | | |
| CLNAS98 | 0.66 | 0.40 | | | |
| CLNCM12 | 0.36 | 0.37 | | | |
| CLNDC19 | 0.43 | 0.84 | | | |
| CLNRC01 | 0.57 | 0.21 | | | |
| CLNRS53 | 0.84 | 0.84 | | | |
| CLNSG27 | 1.09 | 0.54 | | | |
| CLNTX01 | 1.15 | 0.58 | | | |
| CVXKS52 | 3.18 | 8.37 | | | |
| CVXNK23 | 2.09 | 8.46 | | | |
| CVXNKS54 | 9.32 | 3.45 | | | |
| CVXNKS55 | 5.20 | 3.58 | | | |
| CVXNKS81 | 1.00 | 1.06 | | | |
| ENDO10479 | 6.50 | 213.95 | | | |
| ENDO28XA | 4.99 | 12.38 | | | |
| ENDO8XA | 1.68 | 0.71 | | | |
| KID106XD | 0.07 | 0.52 | | | |
| KID107XD | 2.24 | 1.35 | | | |
| KID109XD | 1.81 | 1.47 | | | |
| KID10XD | 0.90 | 0.29 | | | |
| KID22K | 1.58 | 0.45 | | | |
| LNG205L | 2.69 | 2.81 | | | |
| LNG315L | 0.71 | 4.96 | | | |
| LNG507L | 2.75 | 7.13 | | | |
| LNG528L | 5.82 | 2.31 | | | |
| LNG8837L | 1.91 | 4.25 | | | |
| LNGAC11 | 0.91 | 1.19 | | | |
| LNGAC39 | 10.16 | 3.53 | | | |
| LNGSQ80 | 1.10 | 2.42 | | | |
| LNGSQ81 | 0.83 | 3.79 | | | |
| LVR15XA | 9.71 | 1.27 | | | |
| LVR174L | 0.90 | 0.51 | | | |
| LVR187L | 0.51 | 0.46 | | | |
| MAM19DN | 2.11 | 7.79 | | | |
| MAM42DN | 4.38 | 2.36 | | | |
| MAM517 | 16.15 | 3.00 | | | |
| MAM781M | 1.11 | 1.06 | | | |
| MAM869M | 4.04 | 4.07 | | | |
| MAM976M | 3.72 | 1.54 | | | |
| MAMS570 | 0.00 | 3.53 | | | |
| MAMS699 | 2.08 | 2.36 | | | |
| MAMS997 | 23.82 | 4.78 | | | |
| OVRG021 | 6.76 | 28.17 | | | |
| OVR1005O | 11.45 | | | | |
| OVR1040O | 5.83 | | | | |
| OVR105O | 1.86 | | | | |
| OVR130X | 1.08 | | | | |
| OVR718O | 2.84 | | | | |
| OVRA1B | 18.49 | | | | |
| OVR123O | | | 7.03 | | |
| OVR18GA | | | 6.55 | | |
| OVR206I | | | 5.40 | | |
| OVR337O | | | 18.12 | | |
| OVR40G | | | 8.12 | | |
| OVR515O | | | 1.61 | | |
| OVRC004 | | | 11.03 | | |
| OVRC177 | | | 11.67 | | |
| PAN71XL | 0.98 | 1.00 | | | |
| PAN82XP | 2.47 | 10.60 | | | |
| PAN92X | 8.59 | 6.63 | | | |
| SKN287S | 2.77 | 3.14 | | | |
| SKN39A | 3.38 | 3.90 | | | |
| SKN669S | 2.64 | 5.44 | | | |
| SMINT171S | 2.20 | 1.34 | | | |
| SMINT20SM | 7.30 | 2.51 | | | |
| SMINTH89 | 2.01 | 0.49 | | | |
| STO261S | 4.70 | 0.50 | | | |
| STO288S | 0.81 | 0.36 | | | |
| STO509L | 1.26 | 1.50 | | | |
| STO88S | 8.27 | 0.57 | | | |
| THRD143N | 0.34 | 4.80 | | | |
| THRD270T | 1.39 | 0.92 | | | |
| THRD56T | 3.91 | 2.29 | | | |
| TST39X | 1.53 | 0.50 | | | |
| TST647T | 2.00 | 0.27 | | | |
| TST663T | 3.83 | 0.85 | | | |
| UTR135XO | 11.43 | 14.41 | | | |
| UTR85XU | 2.91 | 5.92 | | | |
| BLOB1 | | | 15.76 | | |
| BLOB3 | | | 6.03 | | |
| BLOB5 | | | 67.08 | | |
| BLOB6 | | | 4.14 | | |
| BLOB11 | | | 4.79 | | |
| BLO982B | | | 1.15 | | |
| ADR48AD | | | 0.87 | | |
| BRN10BR | | | 0.60 | | |
| CLN01CL | | | 0.05 | | |
| CVX1ACV | | | 12.22 | | |
| ESO01ES | | | 1.54 | | |
| HRT46HR | | | 0.17 | | |
| HUMREF00HR | 0.26 | | | | |
| KID55KD | | | 0.04 | | |
| LVR89LV | | | 0.06 | | |
| LNG90LN | | | 0.07 | | |
| MAM01MA | | | 1.00 | | |
| MSL84MU | | | 0.21 | | |
| OVR3APV | | | 0.47 | | |
| PAN04PA | | | 0.82 | | |
| PLA59PL | | | [symbol] .07 | | |
| PRO09PR | | | 1.11 | | |
| REC21RC | | | 1.76 | | |
| SMINT59SM | | | 1.02 | | |
| SPL7GSP | | | 0.35 | | |
| STO09ST | | | 0.09 | | |
| THYM99TM | | | 1.46 | | |
| TRA16TR | | | 3.21 | | |
| TST4GTS | | | 0.62 | | |
| UTR57UT | | | 15.19 | | |

0.00 = Negative or not detected

[0612] The sensitivity for Pro177 expression was calculated for the cancer samples versus normal samples. The sensitivity value indicates the percentage of cancer samples that show levels of Pro177 at least 2 fold higher than the normal tissue or the corresponding normal adjacent form the same patient.

[0613] This specificity is an indication of the level of prostate tissue specific expression of the transcript compared to all the other tissue types tested in our assay. Thus, these experiments indicate Pro177 being useful as a prostate cancer diagnostic marker and/or therapeutic target.

[0614] Sensitivity and specificity data is reported in the table below.

| | CLN | LNG | MAM | OVR | PRO |
|---|---|---|---|---|---|
| Sensitivity, | 33% | 22% | 33% | 0% | 73% |
| Up vs. NAT | | | | | |
| Sensitivity, | 0% | 56% | 22% | 0% | 0% |
| Down vs. NAT | | | | | |
| Sensitivity, | 100% | 100% | 78% | 14% | 73% |
| Up vs. NRM | | | | | |
| Sensitivity, | 0% | 0% | 11% | 43% | 9% |
| Down vs. | | | | | |
| NRM | | | | | |
| Specificity | 1.59% | 4.23% | 12.17% | 20.94% | 27.93% |

[0615] Altogether, the tissue specificity, plus the mRNA differential expression in the samples tested are believed to make Pro177 a good marker for diagnosing, monitoring, staging, imaging and treating prostate cancer.

[0616] Primers used for QPCR Expression Analysis of Pro177 are as follows:

SEQ ID NO: 362 (Pro177_forward):
GATGTGACTCTTGCACATTATTTGC
SEQ ID NO: 363 (Pro177_reverse):
CTGTCTGGAGCCTCCTTTCATT
SEQ ID NO: 364 (Pro177_probe):
TTGAAAGCATCTTACAGGGCCACA

DEX0477_{—}016.nt.1 (Pcan057)

[0617] The relative expression level of PCan057 in various tissue samples is included below. Tissue samples include 77 pairs of matching samples, 8 non matched cancer samples, and 34 normal samples, all from various tissues annotated in the table. A matching pair is formed by mRNA from the cancer sample for a particular tissue and mRNA from the normal adjacent sample for that same tissue from the same individual. Of the normal samples 4 were blood samples which measured the expression levels in blood cells. Additionally, 2 prostatitis, and 4 Benign Prostatic Hyperplasia (BPH) samples are included. All the values are compared to normal stomach sample STO09ST (calibrator).

[0618] The table below contains the relative expression level values for the sample as compared to the calibrator. The table includes the Sample Name, Tissue type, and expression level values for the following samples: Cancer (CAN), Normal Adjacent Tissue (NAT), Normal Tissue (NRM), Benign Prostatic Hyperplasia (BPH), and Prostatitis (PROST).

| Sample ID | CAN | NAT | NRM | BPH | PROST |
|---|---|---|---|---|---|
| MAM355 | 6.79 | 0.31 | | | |
| MAMB011X | 2.61 | 7.77 | | | |
| MAMS621 | 0.85 | 0.30 | | | |
| MAMS516 | 1.07 | 0.44 | | | |
| MAM522 | 102.84 | 0.77 | | | |
| MAM76DN | 80.82 | 6.24 | | | |
| MAM976M | 9.15 | 1.99 | | | |
| MAM781M | 1.73 | 1.90 | | | |
| MAM19DN | 4.82 | 8.97 | | | |
| MAM517 | 18.38 | 4.25 | | | |
| MAMS997 | 10.89 | 4.11 | | | |
| MAM42DN | 20.78 | 7.28 | | | |
| MAM869M | 7.06 | 1.71 | | | |
| MAMS699 | 8.54 | 5.25 | | | |
| MAMS570 | 17.62 | 10.56 | | | |
| BLD030B | 1.92 | 0.00 | | | |
| BLD520B | 7.03 | 0.51 | | | |
| BLDTR17 | 3.08 | 0.59 | | | |
| CLN401C | 2.13 | 2.10 | | | |
| CLNAS43 | 3.53 | 0.64 | | | |
| CLNAS98 | 2.00 | 1.13 | | | |
| CLNCM12 | 0.75 | 1.20 | | | |
| CLNDC19 | 2.87 | 1.50 | | | |
| CLNRC01 | 0.85 | 1.05 | | | |
| CLNRS53 | 1.03 | 1.62 | | | |
| CLNSG27 | 1.92 | 2.03 | | | |
| CLNTX01 | 1.74 | 1.85 | | | |
| CVXKS52 | 3.38 | 8.15 | | | |
| CVXNK23 | 3.79 | 8.73 | | | |
| CVXNKS54 | 4.10 | 49.57 | | | |
| CVXNKS55 | 8.49 | 4.76 | | | |
| CVXNKS81 | 1.92 | 4.87 | | | |
| ENDO10479 | 13.23 | 3.97 | | | |
| ENDO28XA | 5.69 | 2.26 | | | |
| ENDO8XA | 1.74 | 1.55 | | | |
| KID106XD | 0.00 | 1.39 | | | |
| KID107XD | 0.57 | 1.69 | | | |
| KID109XD | 1.29 | 2.98 | | | |
| KID10XD | 0.31 | 0.97 | | | |
| KID22K | 0.49 | 0.99 | | | |
| LNG205L | 1.01 | 1.27 | | | |
| LNG315L | 1.27 | 3.56 | | | |
| LNG507L | 4.73 | 2.41 | | | |
| LNG528L | 9.32 | 2.32 | | | |
| LNG8837L | 1.24 | 3.75 | | | |
| LNGAC11 | 1.71 | 1.74 | | | |
| LNGAC39 | 5.84 | 0.90 | | | |
| LNGSQ80 | 0.96 | 0.93 | | | |
| LNGSQ81 | 0.99 | 2.21 | | | |
| LVR15XA | 0.24 | 0.32 | | | |
| LVR174L | 0.34 | 1.35 | | | |
| LVR187L | 0.15 | 2.49 | | | |
| OVRG021 | 2.19 | 2.63 | | | |
| OVR1005O | 7.71 | | | | |
| OVR1040O | 2.47 | | | | |
| OVR105O | 4.05 | | | | |
| OVR130X | 3.88 | | | | |
| OVR718O | 3.51 | | | | |
| OVRA1B | 7.15 | | | | |
| OVR123O | | | 3.78 | | |
| OVR18GA | | | 3.76 | | |
| OVR206I | | | 1.85 | | |
| OVR337O | | | 1.85 | | |
| OVR40G | | | 0.97 | | |
| OVR515O | | | 2.41 | | |
| OVRC004 | | | 4.53 | | |
| OVRC177 | | | 1.01 | | |
| PAN71XL | 5.19 | 2.99 | | | |
| PAN82XP | 0.89 | | | | |
| PAN92X | 4.74 | 1.12 | | | |
| PRO23B | 4.56 | 7.01 | | | |
| PRO65XB | 4.02 | 10.16 | | | |
| PRO675P | 4.98 | 4.21 | | | |
| PRO84XB | 4.33 | 4.74 | | | |
| PRO958P | 4.37 | 4.21 | | | |
| PRO263C | | | | 3.46 | |
| PRO276P | | | | 7.59 | |
| PRO767B | | | | 8.36 | |
| PRO855P | | | | 3.61 | |
| PRO10R | | | | | 5.31 |
| PRO20R | | | | | 5.28 |
| SKN287S | 2.45 | 1.11 | | | |
| SKN39A | 1.06 | 0.84 | | | |
| SKN669S | 2.71 | 3.26 | | | |
| SMINT171S | 2.96 | 3.98 | | | |
| SMINT20SM | 5.70 | 1.96 | | | |
| SMINTH89 | 1.36 | 3.19 | | | |
| STO261S | 3.21 | 1.47 | | | |
| STO288S | 2.10 | 0.27 | | | |
| STO88S | 2.17 | 1.18 | | | |
| THRD143N | 0.50 | 8.02 | | | |
| THRD270T | 9.61 | 6.72 | | | |
| THRD56T | 8.18 | 2.49 | | | |
| TST39X | 1.74 | 0.43 | | | |
| TST647T | 3.39 | 0.51 | | | |
| TST663T | 4.10 | 0.82 | | | |
| UTR135XO | 1.38 | 1.71 | | | |
| UTR85XU | 2.34 | 3.54 | | | |
| BLOB3 | | | 1.79 | | |
| BLOB6 | | | 0.00 | | |
| BLOB11 | | | 0.90 | | |
| BLO982B | | | 0.00 | | |
| ADR48AD | | | 0.16 | | |
| BRN10BR | | | 0.09 | | |
| CLN01CL | | | 1.21 | | |
| ESO01ES | | | 1.16 | | |
| HRT46HR | | | 0.27 | | |
| HUMREF00HR | 0.95 | | | | |
| KID55KD | | | 1.24 | | |
| LVR89LV | | | 0.41 | | |
| LNG90LN | | | 0.82 | | |
| MAM01MA | | | 23.63 | | |
| MSL84MU | | | 0.03 | | |
| OVR3APV | | | 1.66 | | |
| PAN04PA | | | 1.50 | | |
| PLA59PL | | | 3.36 | | |
| PRO09PR | | | 3.65 | | |
| REC21RC | | | 2.68 | | |
| SMINT59SM | | | 1.46 | | |
| SPL7GSP | | | 0.43 | | |
| STO09ST | | | 1.00 | | |
| THYM99TM | | | 0.49 | | |
| TRA16TR | | | 2.82 | | |
| TST4GTS | | | 0.78 | | |
| UTR57UT | | | 2.33 | | |

0.00 = Negative or not detected

[0619] The sensitivity for PCan057 expression was calculated for the cancer samples versus normal samples. The sensitivity value indicates the percentage of cancer samples that show levels of PCan057 at least 2 fold higher than the normal tissue or the corresponding normal adjacent form the same patient.

[0620] This specificity is an indication of the level of breast tissue specific expression of the transcript compared to all the other tissue types tested in our assay. Thus, these experiments indicate PCan057 being useful as a breast cancer diagnostic marker and/or therapeutic target.

[0621] Sensitivity and specificity data is reported in the table below.

| | CLN | LNG | MAM | OVR | PRO |
|---|---|---|---|---|---|
| Sensitivity, | 11% | 22% | 67% | 0% | 0% |
| Up vs. NAT | | | | | |
| Sensitivity, | 0% | 33% | 7% | 0% | 20% |
| Down vs. NAT | | | | | |
| Sensitivity, | 22% | 44% | 13% | 57% | 0% |
| Up vs. NRM | | | | | |
| Sensitivity, | 0% | 0% | 67% | 0% | 0% |
| Down vs. | | | | | |
| NRM | | | | | |
| Specificity | 4.37% | 3.28% | 18.13% | 8.65% | 10.81% |

[0622] Altogether, the tissue specificity, plus the mRNA differential expression in the samples tested are believed to make PCan057 a good marker for diagnosing, monitoring, staging, imaging and treating breast cancer.

[0623] Primers used for QPCR Expression Analysis of PCan057 are as follows:

SEQ ID NO: 365 (PCan057_forward):
AAGGCCTGCTCCTCTTTTAGAAG
SEQ ID NO: 366 (PCan057_reverse):
GAGCAATGATGAGAGGACCCTTT
SEQ ID NO: 367 (PCan057_probe):
CCCCAAGGGAAGCAGAAGGTGACAG

DEX0477_{—}016.nt.2 (Pcan057v1)

[0624] The relative expression level of PCan057v1 in various tissue samples is included below. Tissue samples include 76 pairs of matching samples, 10 non matched cancer samples, and 33 normal samples, all from various tissues annotated in the table. A matching pair is formed by mRNA from the cancer sample for a particular tissue and mRNA from the normal adjacent sample for that same tissue from the same individual. Of the normal samples 4 were blood samples which measured the expression levels in blood cells. Additionally, 2 prostatitis, and 4 Benign Prostatic Hyperplasia (BPH) samples are included. All the values are compared to normal spleen sample SPL7GSP (calibrator).

[0625] The table below contains the relative expression level values for the sample as compared to the calibrator. The table includes the Sample Name, Tissue type, and expression level values for the following samples: Cancer (CAN), Normal Adjacent Tissue (NAT), Normal Tissue (NRM), Benign Prostatic Hyperplasia (BPH), and Prostatitis (PROST).

| Sample ID | CAN | NAT | NRM | BPH | PROST |
|---|---|---|---|---|---|
| MAM355 | 9.01 | 0.38 | | | |
| MAMB011X | 8.10 | 24.92 | | | |
| MAMS621 | 4.37 | 0.46 | | | |
| MAMS516 | 2.26 | 0.66 | | | |
| MAM522 | 434.64 | 3.56 | | | |
| MAM76DN | 309.58 | 14.12 | | | |
| MAM976M | 16.15 | 1.69 | | | |
| MAM781M | 5.13 | 2.22 | | | |
| MAM19DN | 11.79 | 23.56 | | | |
| MAM517 | 76.67 | 20.14 | | | |
| MAMS997 | 18.00 | 9.19 | | | |
| MAM42DN | 27.13 | 17.17 | | | |
| MAM869M | 14.04 | 4.34 | | | |
| MAMS699 | 14.78 | 12.96 | | | |
| MAMS570 | 41.50 | 20.75 | | | |
| BLD030B | 5.13 | 2.24 | | | |
| BLD520B | 22.14 | 1.36 | | | |
| BLDTR17 | 7.76 | 1.28 | | | |
| CLN401C | 4.94 | 4.09 | | | |
| CLNAS43 | 9.74 | 1.35 | | | |
| CLNAS98 | 3.28 | 2.26 | | | |
| CLNCM12 | 1.81 | 4.45 | | | |
| CLNDC19 | 8.61 | 4.09 | | | |
| CLNRC01 | 2.27 | 2.37 | | | |
| CLNRS53 | 1.83 | 4.62 | | | |
| CLNSG27 | 6.51 | 6.14 | | | |
| CLNTX01 | 5.03 | 4.76 | | | |
| CVXKS52 | 11.15 | 18.05 | | | |
| CVXNK23 | 7.99 | | | | |
| CVXNKS54 | 10.68 | 15.83 | | | |
| CVXNKS55 | 19.30 | 12.59 | | | |
| CVXNKS81 | 2.05 | 10.72 | | | |
| ENDO10479 | 22.99 | 8.22 | | | |
| ENDO28XA | 13.27 | 2.94 | | | |
| ENDO8XA | 5.07 | | | | |
| KID106XD | 0.18 | 1.76 | | | |
| KID107XD | 1.77 | 3.61 | | | |
| KID109XD | 2.28 | 6.36 | | | |
| KID10XD | 0.80 | 2.62 | | | |
| KID22K | 1.29 | 2.44 | | | |
| LNG205L | 3.14 | 2.43 | | | |
| LNG315L | 2.48 | 7.94 | | | |
| LNG507L | 7.32 | 7.22 | | | |
| LNG528L | 31.90 | 11.00 | | | |
| LNG8837L | 3.49 | 7.11 | | | |
| LNGAC11 | 6.04 | 2.95 | | | |
| LNGAC39 | 20.49 | 3.61 | | | |
| LNGSQ80 | 4.50 | 2.72 | | | |
| LNGSQ81 | 4.24 | 4.33 | | | |
| LVR15XA | 0.71 | 1.04 | | | |
| LVR174L | 0.86 | 0.86 | | | |
| LVR187L | 0.44 | 5.82 | | | |
| OVRG021 | 6.41 | 11.79 | | | |
| OVR1005O | 13.15 | | | | |
| OVR1040O | 4.87 | | | | |
| OVR105O | 9.07 | | | | |
| OVR130X | 6.44 | | | | |
| OVR718O | 11.04 | | | | |
| OVRA1B | 27.30 | | | | |
| OVR123O | | | 8.25 | | |
| OVR18GA | | | 5.60 | | |
| OVR206I | | | 3.18 | | |
| OVR337O | | | 8.07 | | |
| OVR40G | | | 1.85 | | |
| OVR515O | | | 3.90 | | |
| OVRC177 | | | 1.71 | | |
| PAN71XL | 11.69 | 11.95 | | | |
| PAN82XP | 1.88 | | | | |
| PAN92X | 9.16 | 6.01 | | | |
| PRO23B | 11.45 | 14.99 | | | |
| PRO65XB | 8.82 | 22.69 | | | |
| PRO675P | 15.09 | 16.89 | | | |
| PRO84XB | 7.72 | 7.97 | | | |
| PRO958P | 7.61 | 8.29 | | | |
| PRO263C | | | | 6.88 | |
| PRO276P | | | | 11.39 | |
| PRO767B | | | | 19.05 | |
| PRO855P | | | | 7.73 | |
| PRO10R | | | | | 8.52 |
| PRO20R | | | | | 5.74 |
| SKN287S | 6.30 | 4.35 | | | |
| SKN39A | 2.64 | 2.32 | | | |
| SKN669S | 4.56 | 13.59 | | | |
| SMINT171S | 11.64 | 10.83 | | | |
| SMINT20SM | 13.49 | 5.19 | | | |
| SMINTH89 | 3.54 | 9.44 | | | |
| STO261S | 11.41 | 3.13 | | | |
| STO288S | 5.37 | 0.93 | | | |
| STO509L | 3.39 | 57.03 | | | |
| STO88S | 20.35 | 1.25 | | | |
| THRD143N | 1.14 | 13.07 | | | |
| THRD270T | 14.58 | 9.66 | | | |
| THRD56T | 15.34 | 4.10 | | | |
| TST39X | 3.12 | 1.52 | | | |
| TST647T | 4.77 | 0.61 | | | |
| TST663T | 7.00 | 2.22 | | | |
| UTR135XO | 2.38 | 4.40 | | | |
| UTR85XU | 9.26 | 6.17 | | | |
| BLOB3 | | | 2.80 | | |
| BLOB6 | | | 3.34 | | |
| BLOB11 | | | 2.30 | | |
| BLO982B | | | 0.00 | | |
| ADR48AD | | | 0.16 | | |
| BRN10BR | | | 0.11 | | |
| CLN01CL | | | 2.35 | | |
| ESO01ES | | | 3.41 | | |
| HRT46HR | | | 0.30 | | |
| HUMREF00HR | 2.51 | | | | |
| KID55KD | | | 4.65 | | |
| LVR89LV | | | 1.75 | | |
| LNG90LN | | | 1.78 | | |
| MAM01MA | | | 30.33 | | |
| MSL84MU | | | 0.12 | | |
| OVR3APV | | | 2.32 | | |
| PAN04PA | | | 3.71 | | |
| PLA59PL | | | 9.48 | | |
| PRO09PR | | | 8.03 | | |
| REC21RC | | | 23.24 | | |
| SMINT59SM | | | 4.08 | | |
| SPL7GSP | | | 1.00 | | |
| STO09ST | | | 4.73 | | |
| THYM99TM | | | 1.22 | | |
| TRA16TR | | | 6.43 | | |
| TST4GTS | | | 2.48 | | |
| UTR57UT | | | 3.58 | | |

0.00 = Negative or Not Detected

[0626] The sensitivity for PCan057v1 expression was calculated for the cancer samples versus normal samples. The sensitivity value indicates the percentage of cancer samples that show levels of PCan057v1 at least 2 fold higher than the normal tissue or the corresponding normal adjacent form the same patient.

[0627] This specificity is an indication of the level of breast tissue specific expression of the transcript compared to all the other tissue types tested in our assay. Thus, these experiments indicate PCan057v1 being useful as a breast cancer diagnostic marker and/or therapeutic target.

[0628] Sensitivity and specificity data is reported in the table below.

| | CLN | LNG | MAM | OVR | PRO |
|---|---|---|---|---|---|
| Sensitivity, | 22% | 33% | 67% | 0% | 0% |
| Up vs. NAT | | | | | |
| Sensitivity, | 22% | 22% | 7% | 0% | 20% |
| Down vs. NAT | | | | | |
| Sensitivity, | 56% | 67% | 20% | 57% | 0% |
| Up vs. NRM | | | | | |
| Sensitivity, | 0% | 0% | 53% | 0% | 0% |
| Down vs. NRM | | | | | |
| Specificity | 4.95% | 4.4% | 12.94% | 8.11% | 8.15% |

[0629] Altogether, the tissue specificity, plus the mRNA differential expression in the samples tested are believed to make PCan057v1 a good marker for diagnosing, monitoring, staging, imaging and treating breast or ovarian cancer.

[0630] Primers used for QPCR Expression Analysis of PCan057v1 are as follows:

SEQ ID NO: 368 (PCan057v1_forward):
TCTTGGCATGGCTTCTCTAGCT
SEQ ID NO: 369 (PCan057v1_reverse):
GATGTAGGGAGAGGAAGAGTTCTGA
SEQ ID NO: 370 (PCan057v1_probe):
CATCCTTCCCTCCCCCTCTGTTTCTGA

DEX0477_{—}020.nt.1 (Cln224)

[0631] The relative expression level of Cln224 in various tissue samples is included below. Tissue samples include 79 pairs of matching samples, 7 non matched cancer samples, and 36 normal samples, all from various tissues annotated in the table. A matching pair is formed by mRNA from the cancer sample for a particular tissue and mRNA from the normal adjacent sample for that same tissue from the same individual. Of the normal samples 5 were blood samples which measured the expression levels in blood cells. Additionally, 2 prostatitis, and 4 Benign Prostatic Hyperplasia (BPH) samples are included. All the values are compared to normal stomach sample ST009ST (calibrator).

[0632] The table below contains the relative expression level values for the sample as compared to the calibrator. The table includes the Sample Name, Tissue type, and expression level values for the following samples: Cancer (CAN), Normal Adjacent Tissue (NAT), Normal Tissue ARM), Benign Prostatic Hyperplasia (BPH), and Prostatitis (PROST).

| Sample ID | CAN | NAT | NRM | BPH | PROST |
|---|---|---|---|---|---|
| CLNAS12 | 36.40 | 79.70 | | | |
| CLNAS46 | 52.94 | 51.80 | | | |
| CLNB34 | 24.83 | 13.96 | | | |
| CLNCM67 | 23.14 | 47.99 | | | |
| CLNDC22 | 14.68 | 27.66 | | | |
| CLNTX89 | 44.28 | 59.92 | | | |
| CLN401C | 20.29 | 32.09 | | | |
| CLNAS43 | 37.42 | 72.98 | | | |
| CLNAS98 | 17.31 | 22.77 | | | |
| CLNCM12 | 29.23 | 32.03 | | | |
| CLNDC19 | 100.22 | 20.85 | | | |
| CLNRC01 | 24.10 | 28.55 | | | |
| CLNRS53 | 11.32 | 72.67 | | | |
| CLNSG27 | 41.97 | 64.06 | | | |
| CLNTX01 | 73.02 | 29.52 | | | |
| BLD030B | 0.10 | 0.04 | | | |
| BLD520B | 0.32 | 0.02 | | | |
| BLDTR17 | 0.04 | 0.02 | | | |
| CVXKS52 | 44.82 | 43.20 | | | |
| CVXNKS55 | 66.26 | 26.45 | | | |
| CVXNKS25 | 12.20 | 8.06 | | | |
| CVXNKS18 | 2.60 | 3.94 | | | |
| CVXNKS54 | 2.51 | 4.93 | | | |
| ENDO10479 | 3.27 | 0.21 | | | |
| ENDO28XA | 6.07 | 0.02 | | | |
| ENDO8XA | 0.02 | 0.20 | | | |
| KID106XD | 0.00 | 0.00 | | | |
| KID12XD | 0.00 | 0.54 | | | |
| KID10XD | 0.00 | 0.00 | | | |
| KID22K | 0.00 | 0.00 | | | |
| KID107XD | 0.00 | 0.04 | | | |
| LNG205L | 0.27 | 0.50 | | | |
| LNG315L | 0.15 | 0.98 | | | |
| LNG507L | 1.40 | 0.26 | | | |
| LNG528L | 5.98 | 1.31 | | | |
| LNG8837L | 2.92 | 0.09 | | | |
| LNGAC11 | 0.07 | 2.07 | | | |
| LNGAC39 | 118.16 | 0.51 | | | |
| LNGSQ80 | 2.82 | 0.24 | | | |
| LNGSQ81 | 0.02 | 0.41 | | | |
| LVR15XA | 0.00 | 0.00 | | | |
| LVR174L | 0.30 | 0.11 | | | |
| LVR187L | 0.07 | 150.59 | | | |
| MAM19DN | 0.02 | 0.02 | | | |
| MAM42DN | 0.06 | 0.04 | | | |
| MAM517 | 0.14 | 0.00 | | | |
| MAM781M | 0.00 | 0.04 | | | |
| MAM869M | 1.91 | 0.10 | | | |
| MAM976M | 0.06 | 0.00 | | | |
| MAMS570 | 0.00 | 0.00 | | | |
| MAMS699 | 0.00 | 0.00 | | | |
| MAMS997 | 0.01 | 0.03 | | | |
| OVRG021 | 0.00 | 0.00 | | | |
| OVR206I | | | 0.00 | | |
| OVR515O | | | 0.08 | | |
| OVR18GA | | | 0.00 | | |
| OVR337O | | | 0.00 | | |
| OVR123O | | | 0.00 | | |
| OVRC177 | | | 0.00 | | |
| OVR40G | | | 0.01 | | |
| OVR1005O | 0.03 | | | | |
| OVR1040O | 0.06 | | | | |
| OVR105O | 0.00 | | | | |
| OVR130X | 0.00 | | | | |
| OVR451O | | | 0.00 | | |
| OVR718O | 0.00 | | | | |
| OVRA1B | 0.00 | | | | |
| PAN71XL | 1.38 | 0.42 | | | |
| PAN77X | 0.00 | 0.00 | | | |
| PAN92X | 66.86 | 0.08 | | | |
| PRO10R | | | | | 0.00 |
| PRO20R | | | | | 2.23 |
| PRO23B | 0.02 | 0.04 | | | |
| PRO263C | | | | 0.15 | |
| PRO276P | | | | 0.01 | |
| PRO65XB | 0.00 | 0.00 | | | |
| PRO675P | 0.06 | 0.00 | | | |
| PRO767B | | | | 0.16 | |
| PRO84XB | 0.05 | 0.04 | | | |
| PRO855P | | | | 0.04 | |
| PRO958P | 0.03 | 0.01 | | | |
| SKN287S | 0.42 | 0.00 | | | |
| SKN39A | 0.10 | 0.00 | | | |
| SKN669S | 0.06 | 0.62 | | | |
| SMINT171S | 20.74 | 3.48 | | | |
| SMINT20SM | 108.53 | 33.12 | | | |
| SMINTH89 | 3.50 | 0.55 | | | |
| STO261S | 54.01 | 3.66 | | | |
| STO288S | 30.36 | 0.10 | | | |
| STOAC93 | 7.86 | 21.11 | | | |
| STO88S | 19.63 | 0.05 | | | |
| THRD143N | 23.58 | 0.07 | | | |
| THRD270T | 0.00 | 0.03 | | | |
| THRD56T | 0.01 | 0.09 | | | |
| TST39X | 0.55 | 0.00 | | | |
| TST647T | 0.46 | 0.02 | | | |
| TST663T | 0.54 | 0.00 | | | |
| UTR135XO | 0.00 | 0.00 | | | |
| UTR85XU | 0.00 | 0.02 | | | |
| BLOB3 | | | 0.41 | | |
| BLOB11 | | | 0.04 | | |
| BLO69 | | | 0.00 | | |
| BLO72 | | | 0.00 | | |
| BLO73 | | | 0.00 | | |
| ADR48AD | | | 0.00 | | |
| BRN10BR | | | 0.00 | | |
| CLN01CL | | | 26.49 | | |
| CVX06CV | | | 2.40 | | |
| ESO01ES | | | 15.45 | | |
| HRT46HR | | | 0.00 | | |
| HUMREF00HR | 0.51 | | | | |
| KID55KD | | | 0.00 | | |
| LVR89LV | | | 0.00 | | |
| LNG90LN | | | 5.04 | | |
| MAM01MA | | | 0.01 | | |
| MSL84MU | | | 0.00 | | |
| OVR3APV | | | 0.00 | | |
| PAN04PA | | | 0.01 | | |
| PLA59PL | | | 0.00 | | |
| PRO09PR | | | 0.02 | | |
| REC21RC | | | 38.16 | | |
| SMINT59SM | | | 0.04 | | |
| SPL7GSP | | | 0.01 | | |
| STO09ST | | | 1.00 | | |
| THYM99TM | | | 0.15 | | |
| TRA16TR | | | 31.26 | | |
| TST4GTS | | | 0.04 | | |
| UTR57UT | | | 0.04 | | |

0.00 = Negative or Not detected

[0633] The sensitivity for Cln224 expression was calculated for the cancer samples versus normal samples. The sensitivity value indicates the percentage of cancer samples that show levels of Cln224 at least 2 fold higher than the normal tissue or the corresponding normal adjacent form the same patient.

[0634] This specificity is an indication of the level of gastrointestinal tract tissue specific expression of the transcript compared to all the other tissue types tested in our assay. Thus, these experiments indicate Cln224 being useful as a diagnostic marker and/or therapeutic target for cancers of the gastrointestinal tract.

[0635] Sensitivity and specificity data is reported in the table below.

| | CLN | LNG | MAM | OVR | PRO |
|---|---|---|---|---|---|
| Sensitivity, | 13% | 56% | 33% | 0% | 40% |
| Up vs. NAT | | | | | |
| Sensitivity, | 20% | 33% | 22% | 0% | 20% |
| Down vs. NAT | | | | | |
| Sensitivity, | 13% | 11% | 56% | 29% | 40% |
| Up vs. NRM | | | | | |
| Sensitivity, | 7% | 56% | 33% | 0% | 20% |
| Down vs. NRM | | | | | |
| Specificity | 82.95% | 55.85% | 23.94% | 20% | 25.26% |

[0636] Altogether, the tissue specificity, plus the mRNA differential expression in the samples tested are believed to make Cln224 a good marker for diagnosing, monitoring, staging, imaging and treating cancers of the gastrointestinal tract.

[0637] Primers used for QPCR Expression Analysis of Cln224 are as follows:

SEQ ID NO: 371 (Cln224_forward):
GCCGCAATAATTCCATAGTCAAG
SEQ ID NO: 372 (Cln224_reverse):
CAACCAGCACTCCAATCATGA
SEQ ID NO: 373 (Cln224_probe):
GCATCTGGAACTTCTCCTGGTCTCTCAGCT

DEX0477_{—}020.nt.2 (Cln224v1)

[0638] The relative expression level of Cln224v1 in various tissue samples is included below. Tissue samples include 76 pairs of matching samples, 7 non matched cancer samples, and 36 normal samples, all from various tissues annotated in the table. A matching pair is formed by mRNA from the cancer sample for a particular tissue and mRNA from the normal adjacent sample for that same tissue from the same individual. Of the normal samples 5 were blood samples which measured the expression levels in blood cells. Additionally, 2 prostatitis, and 4 Benign Prostatic Hyperplasia (BPH) samples are included. All the values are compared to normal adjacent colon sample CLNAS46 (calibrator).

[0639] The table below contains the relative expression level values for the sample as compared to the calibrator. The table includes the Sample Name, Tissue type, and expression level values for the following samples: Cancer (CAN), Normal Adjacent Tissue (NAT), Normal Tissue (NRM), Benign Prostatic Hyperplasia (BPH), and Prostatitis (PROST).

| Sample ID | CAN | NAT | NRM | BPH | PROST |
|---|---|---|---|---|---|
| CLNAS12 | 0.60 | 1.23 | | | |
| CLNAS46 | 0.57 | 1.00 | | | |
| CLNB34 | 0.53 | 0.79 | | | |
| CLNCM67 | 0.11 | 0.51 | | | |
| CLNDC22 | 0.32 | 0.91 | | | |
| CLNTX89 | 0.81 | 0.20 | | | |
| CLN401C | 0.28 | 0.21 | | | |
| CLNAS43 | 0.55 | 0.65 | | | |
| CLNAS98 | 0.12 | 0.39 | | | |
| CLNCM12 | 0.25 | 0.67 | | | |
| CLNDC19 | 1.67 | 0.06 | | | |
| CLNRC01 | 0.43 | 0.63 | | | |
| CLNRS53 | 0.27 | 1.25 | | | |
| CLNSG27 | 1.30 | 0.88 | | | |
| CLNTX01 | 0.78 | 0.76 | | | |
| BLD030B | 0.00 | 0.00 | | | |
| BLD520B | 0.00 | 0.00 | | | |
| BLDTR17 | 0.00 | 0.00 | | | |
| CVXKS52 | 0.00 | 0.11 | | | |
| CVXNKS55 | 0.85 | 0.43 | | | |
| CVXNKS25 | 0.16 | 0.00 | | | |
| ENDO28XA | 0.13 | 0.00 | | | |
| ENDO8XA | 0.00 | 0.00 | | | |
| KID106XD | 0.00 | 0.00 | | | |
| KID12XD | 0.00 | 0.00 | | | |
| KID10XD | 0.00 | 0.00 | | | |
| KID22K | 0.00 | 0.00 | | | |
| KID107XD | 0.00 | 0.00 | | | |
| LNG205L | 0.00 | 0.00 | | | |
| LNG315L | 0.00 | 0.14 | | | |
| LNG507L | 0.00 | 0.00 | | | |
| LNG528L | 0.08 | 0.00 | | | |
| LNG8837L | 0.05 | 0.00 | | | |
| LNGAC11 | 0.00 | 0.01 | | | |
| LNGAC39 | 0.63 | 0.00 | | | |
| LNGSQ80 | 0.00 | 0.00 | | | |
| LNGSQ81 | 0.00 | 0.00 | | | |
| LVR15XA | 0.00 | 0.00 | | | |
| LVR174L | 0.00 | 0.00 | | | |
| LVR187L | 0.00 | 3.41 | | | |
| MAM19DN | 0.00 | 0.00 | | | |
| MAM42DN | 0.00 | 0.00 | | | |
| MAM517 | 0.00 | 0.00 | | | |
| MAM781M | 0.00 | 0.00 | | | |
| MAM869M | 0.02 | 0.00 | | | |
| MAM976M | 0.00 | 0.00 | | | |
| MAMS570 | 0.00 | 0.00 | | | |
| MAMS699 | 0.00 | 0.00 | | | |
| MAMS997 | 0.00 | 0.00 | | | |
| OVRG021 | 0.00 | 0.00 | | | |
| OVR206I | | | 0.00 | | |
| OVR515O | | | 0.00 | | |
| OVR18GA | | | 0.00 | | |
| OVR337O | | | 0.00 | | |
| OVR123O | | | 0.00 | | |
| OVRC177 | | | 0.00 | | |
| OVR40G | | | 0.00 | | |
| OVR1005O | 0.00 | | | | |
| OVR1040O | 0.00 | | | | |
| OVR105O | 0.00 | | | | |
| OVR130X | 0.00 | | | | |
| OVR451O | | | 0.00 | | |
| OVR718O | 0.00 | | | | |
| OVRA1B | 0.00 | | | | |
| PAN71XL | 0.03 | 0.00 | | | |
| PAN77X | 0.00 | 0.00 | | | |
| PAN92X | 1.24 | 0.00 | | | |
| PRO10R | | | | | 0.00 |
| PRO20R | | | | | 0.10 |
| PRO23B | 0.00 | 0.00 | | | |
| PRO263C | | | | 0.00 | |
| PRO276P | | | | 0.00 | |
| PRO65XB | 0.00 | 0.00 | | | |
| PRO675P | 0.00 | 0.00 | | | |
| PRO767B | | | | 0.00 | |
| PRO84XB | 0.00 | 0.00 | | | |
| PRO855P | | | | 0.00 | |
| PRO958P | 0.00 | 0.00 | | | |
| SKN287S | 0.00 | 0.00 | | | |
| SKN39A | 0.00 | 0.00 | | | |
| SKN669S | 0.00 | 0.00 | | | |
| SMINT171S | 0.16 | 0.00 | | | |
| SMINT20SM | 2.33 | 0.45 | | | |
| SMINTH89 | 0.02 | 0.02 | | | |
| STO261S | 0.56 | 0.02 | | | |
| STO288S | 0.46 | 0.00 | | | |
| STOAC93 | 0.00 | 0.06 | | | |
| STO88S | 0.08 | 0.00 | | | |
| THRD143N | 0.15 | 0.00 | | | |
| THRD270T | 0.00 | 0.00 | | | |
| THRD56T | 0.00 | 0.00 | | | |
| TST39X | 0.00 | 0.00 | | | |
| TST647T | 0.01 | 0.00 | | | |
| TST663T | 0.02 | 0.00 | | | |
| UTR135XO | 0.00 | 0.00 | | | |
| UTR85XU | 0.00 | 0.00 | | | |
| BLOB3 | | | 0.00 | | |
| BLOB11 | | | 0.00 | | |
| BLO69 | | | 0.00 | | |
| BLO72 | | | 0.00 | | |
| BLO73 | | | 0.00 | | |
| ADR48AD | | | 0.00 | | |
| BRN10BR | | | 0.00 | | |
| CLN01CL | | | 0.33 | | |
| CVX06CV | | | 0.05 | | |
| ESO01ES | | | 0.07 | | |
| HRT46HR | | | 0.00 | | |
| HUMREF00HR | 0.00 | | | | |
| KID55KD | | | 0.00 | | |
| LVR89LV | | | 0.00 | | |
| LNG90LN | | | 0.12 | | |
| MAM01MA | | | 0.00 | | |
| MSL84MU | | | 0.00 | | |
| OVR3APV | | | 0.00 | | |
| PAN04PA | | | 0.00 | | |
| PLA59PL | | | 0.00 | | |
| PRO09PR | | | 0.00 | | |
| REC21RC | | | 1.15 | | |
| SMINT59SM | | | 0.00 | | |
| SPL7GSP | | | 0.00 | | |
| STO09ST | | | 0.03 | | |
| THYM99TM | | | 0.00 | | |
| TRA16TR | | | 0.30 | | |
| TST4GTS | | | 0.01 | | |
| UTR57UT | | | 0.00 | | |

0.00 = Negative or Not detected

[0640] The sensitivity for Cln224v1 expression was calculated for the cancer samples versus normal samples. The sensitivity value indicates the percentage of cancer samples that show levels of Cln224v1 at least 2 fold higher than the normal tissue or the corresponding normal adjacent form the same patient.

[0641] This specificity is an indication of the level of gastrointestinal tract tissue specific expression of the transcript compared to all the other tissue types tested in our assay. Thus, these experiments indicate Cln224v1 being useful as a diagnostic marker and/or therapeutic target for cancers of the gastrointestinal tract.

[0642] Sensitivity and specificity data is reported in the table below.

| | CLN | LNG | MAM | OVR | PRO |
|---|---|---|---|---|---|
| Sensitivity, | 13% | 33% | 11% | 0% | 0% |
| Up vs. | | | | | |
| NAT | | | | | |
| Sensitivity, | 40% | 22% | 0% | 0% | 0% |
| Down vs. | | | | | |
| NAT | | | | | |
| Sensitivity, | 27% | 11% | 11% | 14% | 0% |
| Up vs. | | | | | |
| NRM | | | | | |
| Sensitivity, | 13% | 78% | 0% | 0% | 0% |
| Down vs. | | | | | |
| NRM | | | | | |
| Specificity | 86.47% | 65.38% | 62.09% | 62.5% | 63.04% |

[0643] Altogether, the tissue specificity, plus the mRNA differential expression in the samples tested are believed to make Cln224v1 a, good marker for diagnosing, monitoring, staging, imaging and treating cancers of the gastrointestinal tract.

[0644] Primers used for QPCR Expression Analysis of Cln224v1 are as follows:

SEQ ID NO: 374 (Cln224v1_forward):
GAGCATCACAGTCTCTGACAGTTGT
SEQ ID NO: 375 (Cln224v1_reverse):
TGGCTAGGATGGTCTCGATCTC
SEQ ID NO: 376 (Cln224v1_probe):
TCCTTAAAGCATTTGCAACAGCTACAGTCTAAAATTG

DEX0477_{—}073.nt.1 (Lng278)

[0645] The relative expression level of Lng278 in various tissue samples is included below.

[0646] Tissue samples include 77 pairs of matching samples, 7 non matched cancer samples, and normal samples, all from various tissues annotated in the table. A matching pair is formed by mRNA from the cancer sample for a particular tissue and mRNA from the normal adjacent sample for that same tissue from the same individual. Of the normal samples 5 were blood samples which measured the expression levels in blood cells.

[0647] Additionally, 2-prostatitis, and 4 Benign Prostatic Hyperplasia (BPH) samples are included. All the values are compared to normal prostate sample PRO09PR (calibrator).

[0648] The table below contains the relative expression level values for the sample as compared to the calibrator. The table includes the Sample Name, Tissue type, and expression level values for the following samples: Cancer (CAN), Normal Adjacent Tissue (NAT), Normal Tissue (NRM), Benign Prostatic Hyperplasia (BPH), and Prostatitis (PROST).

| Sample ID | CAN | NAT | NRM | BPH | PROST |
|---|---|---|---|---|---|
| LNG982L | 0.25 | 0.08 | | | |
| LNGAC69 | 1.02 | 0.03 | | | |
| LNGAC90 | 0.14 | 0.06 | | | |
| LNG489L | 0.04 | 0.10 | | | |
| LNGSQ16 | 0.15 | 0.04 | | | |
| LNGSQ79 | 0.56 | 0.40 | | | |
| LNG528L | 0.04 | 0.41 | | | |
| LNG205L | 0.81 | 0.30 | | | |
| LNGAC11 | 0.04 | 0.06 | | | |
| LNGAC39 | 7.53 | 0.33 | | | |
| LNG315L | 0.14 | 0.35 | | | |
| LNGSQ80 | 0.30 | 0.00 | | | |
| LNGSQ81 | 1.07 | 0.00 | | | |
| LNG8837L | 0.11 | 0.15 | | | |
| LNG507L | 0.83 | 0.00 | | | |
| BLD030B | 0.02 | 0.21 | | | |
| BLD520B | 0.44 | 0.16 | | | |
| BLDTR17 | 0.10 | 0.18 | | | |
| CLN401C | 0.75 | 0.83 | | | |
| CLNAS43 | 0.33 | 0.13 | | | |
| CLNAS98 | 0.62 | 0.06 | | | |
| CLNCM12 | 0.16 | 0.19 | | | |
| CLNDC19 | 1.35 | 0.15 | | | |
| CLNRC01 | 0.21 | 0.15 | | | |
| CLNRS53 | 0.11 | 0.00 | | | |
| CLNSG27 | 0.35 | 0.38 | | | |
| CLNTX01 | 2.42 | 0.09 | | | |
| CVXKS52 | 0.00 | 0.06 | | | |
| CVXNK23 | 0.05 | 0.00 | | | |
| CVXNKS54 | 1.18 | 0.00 | | | |
| CVXNKS55 | 0.55 | 0.28 | | | |
| CVXNKS81 | 0.00 | 0.00 | | | |
| ENDO10479 | 0.18 | 0.32 | | | |
| ENDO28XA | 0.71 | 0.19 | | | |
| ENDO8XA | 0.27 | 0.05 | | | |
| KID106XD | 0.00 | 0.00 | | | |
| KID107XD | 0.09 | 0.01 | | | |
| KID109XD | 0.00 | 0.00 | | | |
| KID10XD | 0.00 | 0.00 | | | |
| KID22K | 0.01 | 0.00 | | | |
| LVR15XA | 0.00 | 0.00 | | | |
| LVR174L | 0.01 | 0.00 | | | |
| LVR187L | 0.00 | 1.36 | | | |
| MAM19DN | 0.12 | 2.20 | | | |
| MAM42DN | 0.09 | 0.92 | | | |
| MAM517 | 0.64 | 0.00 | | | |
| MAM781M | 1.08 | 0.00 | | | |
| MAM869M | 0.02 | 0.10 | | | |
| MAM976M | 0.22 | 0.48 | | | |
| MAMS570 | 0.46 | 1.65 | | | |
| MAMS699 | 0.45 | 0.00 | | | |
| MAMS997 | 0.54 | 0.57 | | | |
| OVRG021 | 0.04 | 0.05 | | | |
| OVR1005O | 0.71 | | | | |
| OVR1040O | 0.15 | | | | |
| OVR105O | 0.53 | | | | |
| OVR130X | 0.00 | | | | |
| OVR718O | 0.11 | | | | |
| OVRA1B | 0.10 | | | | |
| OVR123O | | | 0.00 | | |
| OVR18GA | | | 0.00 | | |
| OVR206I | | | 0.00 | | |
| OVR337O | | | 0.00 | | |
| OVR40G | | | 0.00 | | |
| OVR515O | | | 0.00 | | |
| OVRC004 | | | 0.00 | | |
| OVRC177 | | | 0.00 | | |
| PAN71XL | 0.34 | 0.01 | | | |
| PAN82XP | 0.02 | 0.00 | | | |
| PRO23B | 0.31 | 0.12 | | | |
| PRO65XB | 0.22 | 2.15 | | | |
| PRO675P | 1.45 | 0.36 | | | |
| PRO84XB | 0.32 | 1.38 | | | |
| PRO958P | 0.72 | 0.16 | | | |
| PRO263C | | | | 0.35 | |
| PRO276P | | | | 0.26 | |
| PRO767B | | | | 1.63 | |
| PRO855P | | | | 0.14 | |
| PRO10R | | | | | 0.39 |
| PRO20R | | | | | 0.55 |
| SKN287S | 0.11 | 0.00 | | | |
| SKN39A | 0.10 | 0.31 | | | |
| SKN669S | 0.21 | 0.39 | | | |
| SMINT171S | 1.46 | 0.05 | | | |
| SMINT20SM | 3.66 | 0.36 | | | |
| SMINTH89 | 0.11 | 0.05 | | | |
| STO261S | 0.78 | 0.16 | | | |
| STO288S | 0.01 | 0.18 | | | |
| STO88S | 0.51 | 0.08 | | | |
| THRD143N | 0.02 | 0.07 | | | |
| THRD270T | 0.06 | 0.07 | | | |
| THRD56T | 0.44 | 0.01 | | | |
| TST39X | 0.39 | 0.00 | | | |
| TST647T | 0.11 | 0.00 | | | |
| TST663T | 0.21 | 0.01 | | | |
| UTR135XO | 0.26 | 0.00 | | | |
| UTR85XU | 1.44 | 0.78 | | | |
| BLOB1 | | | 0.00 | | |
| BLOB3 | | | 0.30 | | |
| BLOB6 | | | 1.29 | | |
| BLOB11 | | | 0.29 | | |
| BLO982B | | | 0.97 | | |
| ADR48AD | | | 0.00 | | |
| BRN10BR | | | 0.00 | | |
| CLN01CL | | | 0.03 | | |
| ESO01ES | | | 0.12 | | |
| HRT46HR | | | 0.00 | | |
| HUMREF00HR | 0.14 | | | | |
| KID55KD | | | 0.00 | | |
| LVR89LV | | | 0.00 | | |
| LNG90LN | | | 0.30 | | |
| MAM01MA | | | 0.10 | | |
| MSL84MU | | | 0.00 | | |
| OVR3APV | | | 0.00 | | |
| PAN04PA | | | 0.00 | | |
| PLA59PL | | | 1.35 | | |
| PRO09PR | | | 1.00 | | |
| REC21RC | | | 0.14 | | |
| SMINT59SM | | | 0.01 | | |
| SPL7GSP | | | 0.15 | | |
| STO09ST | | | 0.19 | | |
| THYM99TM | | | 0.48 | | |
| TRA16TR | | | 3.75 | | |
| TST4GTS | | | 0.03 | | |
| UTR57UT | | | 0.09 | | |

0.00 = Negative or Not detected

[0649] The sensitivity for Lng78 expression was calculated for the cancer samples versus normal samples. The sensitivity value indicates the percentage of cancer samples that show levels of Lng78 at least 2 fold higher than the normal tissue or the corresponding normal adjacent form the same patient.

[0650] This specificity is an indication of the level of lung, colon and ovary tissue specific expression of the transcript-compared to all the other tissue types tested in our assay. Thus, these experiments indicate Lng278 being useful as a lung, colon and ovarian cancer diagnostic marker and/or therapeutic target.

[0651] Sensitivity and specificity data is reported in the table below.

| | CLN | LNG | MAM | OVR | PRO |
|---|---|---|---|---|---|
| Sensitivity, | 56% | 60% | 33% | 0% | 60% |
| Up vs. | | | | | |
| NAT | | | | | |
| Sensitivity, | 0% | 20% | 56% | 0% | 40% |
| Down vs. | | | | | |
| NAT | | | | | |
| Sensitivity, | 100% | 33% | 67% | 86% | 0% |
| Up vs. | | | | | |
| NRM | | | | | |
| Sensitivity, | 0% | 47% | 11% | 0% | 60% |
| Down vs. | | | | | |
| NRM | | | | | |
| Specificity | 32.43% | 32.37% | 33.51% | 21.93% | 33.16% |

[0652] Altogether, the tissue specificity, plus the mRNA differential expression in the samples tested are believed to make Lng278 a good marker for diagnosing, monitoring, staging, imaging and treating lung, colon and ovarian cancer.

[0653] Primers used for QPCR Expression Analysis of Lng278 are as follows:

SEQ ID NO: 377 (Lng278_forward):
ACATTCAGGGACCAGGCTTGT
SEQ ID NO: 378 (Lng278_reverse):
GGTCATACAGGATCATGTGCAT
SEQ ID NO: 379 (Lng278_probe):
AAACTGACTCCCCACTTCTTCCCA

Conclusions

[0654] Altogether, the high level of tissue specificity, plus the mRNA overexpression in matched samples tested are indicative of SEQ ID NO: 1-141 being a diagnostic marker and/or a therapeutic target for cancer.

### Example 3

### Protein Expression

[0655] The CaSNA is amplified by polymerase chain reaction (PCR) and the amplified DNA fragment encoding the CaSNA is subcloned in pET-21d for expression in E. coli. In addition to the CaSNA coding sequence, codons for two amino acids, Met-Ala, flanking the NH₂-terminus of the coding sequence of CaSNA, and six histidines, flanking the COOH-terminus of the coding sequence of CaSNA, are incorporated to serve as initiating Met/restriction site and purification tag, respectively.

[0656] An over-expressed protein band of the appropriate molecular weight may be observed on a Coomassie blue stained polyacrylamide gel. This protein band is confirmed by Western blot analysis using monoclonal antibody against 6× Histidine tag.

[0657] Large-scale purification of CaSP is achieved using cell paste generated from 6-liter bacterial cultures, and purified using immobilized metal affinity chromatography (IMAC). Soluble fractions that are separated from total cell lysate were incubated with a nickel chelating resin. The column is packed and washed with five column volumes of wash buffer. CaSP is eluted stepwise with various concentration imidazole buffers.

### Example 4

### Fusion Proteins

[0658] The human Fc portion of the IgG molecule can be PCR amplified, using primers that span the 5′ and 3′ ends of the sequence described below. These primers also should have convenient restriction enzyme sites that will facilitate cloning into an expression vector, preferably a mammalian expression vector. For example, if pC4 (Accession No. 209646) is used, the human Fc portion can be ligated into the BamHI cloning site. Note that the 3′ BamHI site should be destroyed. Next, the vector containing the human Fc portion is re-restricted with BamHI, linearizing the vector, and a polynucleotide of the present invention, isolated by the PCR protocol described in Example 2, is ligated into this BamHI site. Note that the polynucleotide is cloned without a stop codon, otherwise a fusion protein will not be produced. If the naturally occurring signal sequence is used to produce the secreted protein, pC4 does not need a second signal peptide. Alternatively, if the naturally occurring signal sequence is not used, the vector can be modified to include a heterologous signal sequence. See, e.g., WO 96/34891.

### Example 5

### Production of an Antibody from a Polypeptide

[0659] In general, such procedures involve immunizing an animal (preferably a mouse) with polypeptide or, more preferably, with a secreted polypeptide-expressing cell. Such cells may be cultured in any suitable tissue culture medium; however, it is preferable to culture cells in Earle's modified Eagle's medium supplemented with 10% fetal bovine serum (inactivated at about 56° C.), and supplemented with about 10 g/l of nonessential amino acids, about 1,000 U/ml of penicillin, and about 100, μg/ml of streptomycin. The splenocytes of such mice are extracted and fused with a suitable myeloma cell line. Any suitable myeloma cell line may be employed in accordance with the present invention, however, it is preferable to employ the parent myeloma cell line (SP20), available from the ATCC. After fusion, the resulting hybridoma cells are selectively maintained in HAT medium, and then cloned by limiting dilution as described by Wands et al., Gastroenterology 80: 225-232 (1981).

[0660] The hybridoma cells obtained through such a selection are then assayed to identify clones which secrete antibodies capable of binding the polypeptide. Alternatively, additional antibodies capable of binding to the polypeptide can be produced in a two-step procedure using anti-idiotypic antibodies. Such a method makes use of the fact that antibodies are themselves antigens, and therefore, it is possible to obtain an antibody which binds to a second antibody. In accordance with this method, protein specific antibodies are used to immunize an animal, preferably a mouse. The splenocytes of such an animal are then used to produce hybridoma cells, and the hybridoma cells are screened to identify clones which produce an antibody whose ability to bind to the protein-specific antibody can be blocked by the polypeptide. Such antibodies comprise anti-idiotypic antibodies to the protein specific antibody and can be used to immunize an animal to induce formation of further protein-specific antibodies.

### Example 6

### Method of Determining Alterations in a Gene Corresponding to a Polynucleotide

[0661] RNA is isolated from individual patients or from a family of individuals that have a phenotype of interest. cDNA is then generated from these RNA samples using protocols known in the art. See, Sambrook (2001), supra. The cDNA is then used as a template for PCR, employing primers surrounding regions of interest in SEQ ID NO: 1-141. Suggested PCR conditions consist of 35 cycles at 950C for 30 seconds; 60-120 seconds at 52-58° C.; and 60-120 seconds at 70° C., using buffer solutions described in Sidransky et al., Science 252(5006): 706-9 (1991). See also Sidransky et al., Science 278(5340): 1054-9 (1997).

[0662] PCR products are then sequenced using primers labeled at their 5′ end with T4 polynucleotide kinase, employing SequiTherm Polymerase. (Epicentre Technologies). The intron-exon borders of selected exons are also determined and genomic PCR products analyzed to confirm the results. PCR products harboring suspected mutations are then cloned and sequenced to validate the results of the direct sequencing. PCR products is cloned into T-tailed vectors as described in Holton et al., Nucleic Acids Res., 19: 1156 (1991) and sequenced with T7 polymerase (United States Biochemical). Affected individuals are identified by mutations not present in unaffected individuals.

[0663] Genomic rearrangements may also be determined. Genomic clones are nick-translated with digoxigenin deoxyuridine 5′ triphosphate (Boehringer Manheim), and FISH is performed as described in Johnson et al., Methods Cell Biol. 35: 73-99 (1991). Hybridization with the labeled probe is carried out using a vast excess of human cot-1 DNA for specific hybridization to the corresponding genomic locus.

[0664] Chromosomes are counterstained with 4,6-diamino-2-phenylidole and propidium iodide, producing a combination of C-and R-bands. Aligned images for precise mapping are obtained using a triple-band filter set (Chroma Technology, Brattleboro, Vt.) in combination with a cooled charge-coupled device camera (Photometrics, Tucson, Ariz.) and variable excitation wavelength filters. Johnson (1991). Image collection, analysis and chromosomal fractional length measurements are performed using the ISee Graphical Program System. (Inovision Corporation, Durham, N.C.) Chromosome alterations of the genomic region hybridized by the probe are identified as insertions, deletions, and translocations. These alterations are used as a diagnostic marker for an associated disease.

### Example 7

### Method of Detecting Abnormal Levels of a Polypeptide in a Biological Sample

[0665] Antibody-sandwich ELISAs are used to detect polypeptides in a sample, preferably a biological sample. Wells of a microtiter plate are coated with specific antibodies, at a final concentration of 0.2 to 10 ug/ml. The antibodies are either monoclonal or polyclonal and are produced by the method described above. The wells are blocked so that non-specific binding of the polypeptide to the well is reduced. The coated wells are then incubated for >2 hours at RT with a sample containing the polypeptide. Preferably, serial dilutions of the sample should be used to validate results. The plates are then washed three times with deionized or distilled water to remove unbound polypeptide. Next, 50 μl of specific antibody-alkaline phosphatase conjugate, at a concentration of 25-400 ng, is added and incubated for 2 hours at room temperature. The plates are again washed three times with deionized or distilled water to remove unbound conjugate. 75 μl of 4-methylumbelliferyl phosphate (MUP) or p-nitrophenyl phosphate (NPP) substrate solution are added to each well and incubated 1 hour at room temperature.

[0666] The reaction is measured by a microtiter plate reader. A standard curve is prepared, using serial dilutions of a control sample, and polypeptide concentrations are plotted on other X-axis (log scale) and fluorescence or absorbance on the Y-axis (linear scale). The concentration of the polypeptide in the sample is calculated using the standard curve.

### Example 8

### Formulating a Polypeptide

[0667] The secreted polypeptide composition will be formulated and dosed in a fashion consistent with good medical practice, taking into account the clinical condition of the individual patient (especially the side effects of treatment with the secreted polypeptide alone), the site of delivery, the method of administration, the scheduling of administration, and other factors known to practitioners. The “effective amount” for purposes herein is thus determined by such considerations.

[0668] As a general proposition, the total pharmaceutically effective amount of secreted polypeptide administered parenterally per dose will be in the range of about 1, μg/kg/day to 10 mg/kg/day of patient body weight, although, as noted above, this will be subject to therapeutic discretion. More preferably, this dose is at least 0.01 mg/kg/day, and most preferably for humans between about 0.01 and 1 mg/kg/day for the hormone. If given continuously, the secreted polypeptide is typically administered at a dose rate of about 1 μg/kg/hour to about 50 mg/kg/hour, either by 1-4 injections per day or by continuous subcutaneous infusions, for example, using a mini-pump. An intravenous bag solution may also be employed. The length of treatment needed to observe changes and the interval following treatment for responses to occur appears to vary depending on the desired effect.

[0669] Pharmaceutical compositions containing the secreted protein of the invention are administered orally, rectally, parenterally, intracistemally, intravaginally, intraperitoneally, topically (as by powders, ointments, gels, drops or transdermal patch), bucally, or as an oral or nasal spray. “Pharmaceutically acceptable carrier” refers to a non-toxic solid, semisolid or liquid filler, diluent, encapsulating material or formulation auxiliary of any type. The term “parenteral” as used herein refers to modes of administration which include intravenous, intramuscular, intraperitoneal, intrasternal, subcutaneous and intraarticular injection and infusion.

[0670] The secreted polypeptide is also suitably administered by sustained-release systems. Suitable examples of sustained-release compositions include semipermeable polymer matrices in the form of shaped articles, e.g., films, or microcapsules. Sustained-release matrices include polylactides (U.S. Pat. No. 3,773,919, EP 58,481, the contents of which are hereby incorporated by reference herein in their entirety), copolymers of L-glutamic acid and gamma-ethyl-L-glutamate (Sidman, U. et al., Biopolymers 22: 547-556 (1983)), poly (2-hydroxyethyl methacrylate) (R. Langer et al., J. Biomed Mater. Res. 15: 167-277 (1981), and R. Langer, Chem. Tech. 12: 98-105 (1982)), ethylene vinyl acetate (R. Langer et al.) or poly-D-(−)-3-hydroxybutyric acid (EP 133,988). Sustained-release compositions also include liposomally entrapped polypeptides. Liposomes containing the secreted polypeptide are prepared by methods known per se: DE Epstein et al., Proc. Natl. Acad. Sci. USA 82: 3688-3692 (1985); Hwang et al., Proc. Natl. Acad. Sci. USA 77: 4030-4034 (1980); EP 52,322; EP 36,676; EP 88,046; EP 143,949; EP 142,641; Japanese Pat. Appl. 83-118008; U.S. Pat. Nos. 4,485,045 and 4,544,545; and EP 102,324, the contents of which are hereby incorporated by reference herein in their entirety. Ordinarily, the liposomes are of the small (about 200-800 Angstroms) unilamellar type in which the lipid content is greater than about 30 mol. percent cholesterol, the selected proportion being adjusted for the optimal secreted polypeptide therapy.

[0671] For parenteral administration, in one embodiment, the secreted polypeptide is formulated generally by mixing it at the desired degree of purity, in a unit dosage injectable form (solution, suspension, or emulsion), with a pharmaceutically acceptable carrier, i.e., one that is non-toxic to recipients at the dosages and concentrations employed and is compatible with other ingredients of the formulation.

[0672] For example, the formulation preferably does not include oxidizing agents and other compounds that are known to be deleterious to polypeptides. Generally, the formulations are prepared by contacting the polypeptide uniformly and intimately with liquid carriers or finely divided solid carriers or both. Then, if necessary, the product is shaped into the desired formulation. Preferably, the carrier is a parenteral carrier, more preferably, a solution that is isotonic with the blood of the recipient. Examples of such carrier vehicles include water, saline, Ringer's solution, and dextrose solution. Non-aqueous vehicles such as fixed oils and ethyl oleate are also useful herein, as well as liposomes.

[0673] The carrier suitably contains minor amounts of additives such as substances that enhance isotonicity and chemical stability. Such materials are non-toxic to recipients at the dosages and concentrations employed, and include buffers such as phosphate, citrate, succinate, acetic acid, and other organic acids or their salts; antioxidants such as ascorbic acid; low molecular weight (less than about ten residues) polypeptides, e.g., polyarginine or tripeptides; proteins, such as serum albumin, gelatin, or immunoglobulins; hydrophilic polymers such as polyvinylpyrrolidone; amino acids, such as glycine, glutamic acid, aspartic acid, or arginine; monosaccharides, disaccharides, and other carbohydrates including cellulose or its derivatives, glucose, manose, or dextrins; chelating agents such as EDTA; sugar alcohols such as mannitol or sorbitol; counterions such as sodium; and/or nonionic surfactants such as polysorbates, poloxamers, or PEG.

[0674] The secreted polypeptide is typically formulated in such vehicles at a concentration of about 0.1 mg/ml to 100 mg/ml, preferably 1-10 mg/ml, at a pH of about 3 to 8. It will be understood that the use of certain of the foregoing excipients, carriers, or stabilizers will result in the formation of polypeptide salts.

[0675] Any polypeptide to be used for therapeutic administration can be sterile. Sterility is readily accomplished by filtration through sterile filtration membranes (e.g., 0.2 micron membranes). Therapeutic polypeptide compositions generally are placed into a container having a sterile access port, for example, an intravenous solution bag or vial having a stopper pierceable by a hypodermic injection needle.

[0676] Polypeptides ordinarily will be stored in unit or multi-dose containers, for example, sealed ampules or vials, as an aqueous solution or as a lyophilized formulation for reconstitution. As an example of a lyophilized formulation, 10-ml vials are filled with 5 ml of sterile-filtered 1% (w/v) aqueous polypeptide solution, and the resulting mixture is lyophilized. The infusion solution is prepared by reconstituting the lyophilized polypeptide using bacteriostatic Water-for-Injection.

[0677] The invention also provides a pharmaceutical pack or kit comprising one or more containers filled with one or more of the ingredients of the pharmaceutical compositions of the invention. Associated with such container (s) can be a notice in the form prescribed by a governmental agency regulating the manufacture, use or sale of pharmaceuticals or biological products, which notice reflects approval by the agency of manufacture, use or sale for human administration. In addition, the polypeptides of the present invention may be employed in conjunction with other therapeutic compounds.

### Example 9

### Method of Treating Decreased Levels of the Polypeptide

[0678] It will be appreciated that conditions caused by a decrease in the standard or normal expression level of a secreted protein in an individual can be treated by administering the polypeptide of the present invention, preferably in the secreted form. Thus, the invention also provides a method of treatment of an individual in need of an increased level of the polypeptide comprising administering to such an individual a pharmaceutical composition comprising an amount of the polypeptide to increase the activity level of the polypeptide in such an individual.

[0679] For example, a patient with decreased levels of a polypeptide receives a daily dose 0.1-100 ug/kg of the polypeptide for six consecutive days. Preferably, the polypeptide is in the secreted form. The exact details of the dosing scheme, based on administration and formulation, are provided above.

### Example 10

### Method of Treating Increased Levels of the Polypeptide

[0680] Antisense or RNAi technology are used to inhibit production of a polypeptide of the present invention. This technology is one example of a method of decreasing levels of a polypeptide, preferably a secreted form, due to a variety of etiologies, such as cancer.

[0681] For example, a patient diagnosed with abnormally increased levels of a polypeptide is administered intravenously antisense polynucleotides at 0.5, 1.0, 1.5, 2.0 and 3.0 mg/kg day for 21 days. This treatment is repeated after a 7-day rest period if the treatment was well tolerated. The formulation of the antisense polynucleotide is provided above.

### Example 11

### Method of Treatment Using Gene Therapy

[0682] One method of gene therapy transplants fibroblasts, which are capable of expressing a polypeptide, onto a patient. Generally, fibroblasts are obtained from a subject by skin biopsy. The resulting tissue is placed in tissue-culture medium and separated into small pieces. Small chunks of the tissue are placed on a wet surface of a tissue culture flask, approximately ten pieces are placed in each flask. The flask is turned upside down, closed tight and left at room temperature over night. After 24 hours at room temperature, the flask is inverted and the chunks of tissue remain fixed to the bottom of the flask and fresh media (e.g., Ham's F12 media, with 10% FBS, penicillin and streptomycin) is added. The flasks are then incubated at 37° C. for approximately one week.

[0683] At this time, fresh media is added and subsequently changed-every several days. After an additional two weeks in culture, a monolayer of fibroblasts emerge. The monolayer is trypsinized and scaled into larger flasks. pMV-7 (Kirschmeier, P. T. et al., DNA, 7: 219-25 (1988)), flanked by the long terminal repeats of the Moloney murine sarcoma virus, is digested with EcoRI and HindIII and subsequently treated with calf intestinal phosphate. The linear vector is fractionated on agarose gel and purified, using glass beads.

[0684] The cDNA encoding a polypeptide of the present invention can be amplified using PCR primers which correspond to the 5′and 3′end sequences respectively as set forth in Example 3. Preferably, the 5′primer contains an EcoRI site and the 3′primer includes a HindIII site. Equal quantities of the Moloney murine sarcoma virus linear backbone and the amplified EcoRI and HindIII fragment are added together, in the presence of T4 DNA ligase. The resulting mixture is maintained under conditions appropriate for ligation of the two fragments. The ligation mixture is then used to transform bacteria HB 101, which are then plated onto agar containing kanamycin for the purpose of confirming that the vector has the gene of interest properly inserted.

[0685] The amphotropic pA317 or GP+aml2 packaging cells are grown in tissue culture to confluent density in Dulbecco's Modified Eagles Medium (DMEM) with 10% calf serum (CS), penicillin and streptomycin. The MSV vector containing the gene is then added to the media and the packaging cells transduced with the vector. The packaging cells now produce infectious viral particles containing the gene (the packaging cells are now referred to as producer cells).

[0686] Fresh media is added to the transduced producer cells, and subsequently, the media is harvested from a 10 cm plate of confluent producer cells. The spent media, containing the infectious viral particles, is filtered through a millipore filter to remove detached producer cells and this media is then used to infect fibroblast cells. Media is removed from a sub-confluent plate of fibroblasts and quickly replaced with the media from the producer cells. This media is removed and replaced with fresh media.

[0687] If the titer of virus is high, then virtually all fibroblasts will be infected and no selection is required. If the titer is very low, then it is necessary to use a retroviral vector that has a selectable marker, such as neo or his. Once the fibroblasts have been efficiently infected, the fibroblasts are analyzed to determine whether protein is produced.

[0688] The engineered fibroblasts are then transplanted onto the host, either alone or after having been grown to confluence on cytodex 3 microcarrier beads.

### Example 12

### Method of Treatment Using Gene Therapy-In Vivo

[0689] Another aspect of the present invention is using in vivo gene therapy methods to treat disorders, diseases and conditions. The gene therapy method relates to the introduction of naked nucleic acid (DNA, RNA, and antisense DNA or RNA) sequence into an animal to increase or decrease the expression of the polypeptide.

[0690] The polynucleotide of the present invention may be operatively linked to a promoter or any other genetic elements necessary for the expression of the polypeptide by the target tissue. Such gene therapy and delivery techniques and methods are known in the art, see, for example, Tabata H. et al. Cardiovasc. Res. 35 (3): 470-479 (1997); Chao J et al. Pharmacol. Res. 35 (6): 517-522 (1997); Wolff J. A. Neuromuscul. Disord. 7 (5): 314-318 (1997), Schwartz B. et al. Gene Ther. 3 (5): 405-411 (1996); and Tsurumi Y. et al. Circulation 94 (12): 3281-3290 (1996); W0 90/11092, W0 98/11779; U.S. Pat. Nos. 5,693,622; 5,705,151; 5,580,859, the contents of which are hereby incorporated by reference herein in their entirety.

[0691] The polynucleotide constructs may be delivered by any method that delivers injectable materials to the cells of an animal, such as, injection into the interstitial space of tissues (heart, muscle, skin, breast, colon, lung, ovarian, prostate, liver, intestine and the like). The polynucleotide constructs can be delivered in a pharmaceutically acceptable liquid or aqueous carrier.

[0692] The term “naked” polynucleotide, DNA or RNA, refers to sequences that are free from any delivery vehicle that acts to assist, promote, or facilitate entry into the cell, including viral sequences, viral particles, liposome formulations, lipofectin or precipitating agents and the like. However, the polynucleotides of the present invention may also be delivered in liposome formulations (such as those taught in Felgner P. L. et al. Ann. NY Acad. Sci. 772: 126-139 (1995) and Abdallah B. et al. Biol. Cell 85 (1): 1-7 (1995)) which can be prepared by methods well known to those skilled in the art.

[0693] The polynucleotide vector constructs used in the gene therapy method are preferably constructs that will not integrate into the host genome nor will they contain sequences that allow for replication. Any strong promoter known to those skilled in the art can be used for driving the expression of DNA. Unlike other gene therapies techniques, one major advantage of introducing naked nucleic acid sequences into target cells is the transitory nature of the polynucleotide synthesis in the cells. Studies have shown that non-replicating DNA sequences can be introduced into cells to provide production of the desired polypeptide for periods of up to six months.

[0694] The polynucleotide construct can be delivered to the interstitial space of tissues within the an animal, including of muscle, skin, brain, breast, colon, lung, ovarian, prostate, liver, spleen, bone marrow, thymus, heart, lymph, blood, bone, cartilage, pancreas, kidney, gall bladder, stomach, intestine, testis, ovary, uterus, rectum, nervous system, eye, gland, and connective tissue. Interstitial space of the tissues comprises the intercellular fluid, mucopolysaccharide matrix among the reticular fibers of organ tissues, elastic fibers in the walls of vessels or chambers, collagen fibers of fibrous tissues, or that same matrix within connective tissue ensheathing muscle cells or in the lacunae of bone. It is similarly the space occupied by the plasma of the circulation and the lymph fluid of the lymphatic channels. Delivery to the interstitial space of muscle tissue is preferred for the reasons discussed below. They may be conveniently delivered by injection into the tissues comprising these cells. They are preferably delivered to and expressed in persistent, non-dividing cells which are differentiated, although delivery and expression may be achieved in non-differentiated or less completely differentiated cells, such as, for example, stem cells of blood or skin fibroblasts. In vivo muscle cells are particularly competent in their ability to take up and express polynucleotides.

[0695] For the naked polynucleotide injection, an effective dosage amount of DNA or RNA will be in the range of from about 0.05 μg/kg body weight to about 50 mg/kg body weight. Preferably the dosage will be from about 0.005 mg/kg to about 20 mg/kg and more preferably from about 0.05 mg/kg to about 5 mg/kg. Of course, as the artisan of ordinary skill will appreciate, this dosage will vary according to the tissue site of injection. The appropriate and effective dosage of nucleic acid sequence can readily be determined by those of ordinary skill in the art and may depend on the condition being treated and the route of administration. The preferred route of administration is by the parenteral route of injection into the interstitial space of tissues. However, other parenteral routes may also be used, such as, inhalation of an aerosol formulation particularly for delivery to breast, colon, lung, ovarian, prostate or bronchial tissues, throat or mucous membranes of the nose. In addition, naked polynucleotide constructs can be delivered to arteries during angioplasty by the catheter used in the procedure.

[0696] The dose response effects of injected polynucleotide in muscle in vivo is determined as follows. Suitable template DNA for production of mRNA coding for polypeptide of the present invention is prepared in accordance with a standard recombinant DNA methodology. The template DNA, which may be either circular or linear, is either used as naked DNA or complexed with liposomes. The quadriceps muscles of mice are then injected with various amounts of the template DNA.

[0697] Five to six week old female and male Balb/C mice are anesthetized by intraperitoneal injection with 0.3 ml of 2.5% Avertin. A 1.5 cm incision is made on the anterior thigh, and the quadriceps muscle is directly visualized. The template DNA is injected in 0.1 ml of carrier in a 1 cc syringe through a 27 gauge needle over one minute, approximately 0.5 cm from the distal insertion site of the muscle into the knee and about 0.2 cm deep. A suture is placed over the injection site for future localization, and the skin is closed with stainless steel clips.

[0698] After an appropriate incubation time (e.g., 7 days) muscle extracts are prepared by excising the entire quadriceps. Every fifth 15 um cross-section of the individual quadriceps muscles is histochemically stained for protein expression. A time course for protein expression may be done in a similar fashion except that quadriceps from different mice are harvested at different times. Persistence of DNA in muscle following injection may be determined by Southern blot analysis after preparing total cellular DNA and HIRT supernatants from injected and control mice.

[0699] The results of the above experimentation in mice can be use to extrapolate proper dosages and other treatment parameters in humans and other animals using naked DNA.

### Example 13

### Transgenic Animals

[0700] The polypeptides of the invention can also be expressed in transgenic animals. Animals of any species, including, but not limited to, mice, rats, rabbits, hamsters, guinea pigs, pigs, micro-pigs, goats, sheep, cows and non-human primates, e.g., baboons, monkeys, and chimpanzees may be used to generate transgenic animals. In a specific embodiment, techniques described herein or otherwise known in the art, are used to express polypeptides of the invention in humans, as part of a gene therapy protocol.

[0701] Any technique known in the art may be used to introduce the transgene (I. e., polynucleotides of the invention) into animals to produce the founder lines of transgenic animals. Such techniques include, but are not limited to, pronuclear microinjection (Paterson et al. Appl. Microbiol. Biotechnol. 40: 691-698 (1994); Carver et al., Biotechnology 11: 1263-1270 (1993); Wright et al., Biotechnology 9: 830-834 (1991); and U.S. Pat. No. 4,873,191, the contents of which is hereby incorporated by reference herein in its entirety); retrovirus mediated gene transfer into germ lines (Van der Putten et al., Proc. Natl. Acad. Sci., USA 82: 6148-6152 (1985)), blastocysts or embryos; gene targeting in embryonic stem cells (Thompson et al., Cell 56: 131-321 (−1989)); electroporation of cells or embryos (Lo, 1983, Mol Cell. Biol. 3: 1863-181⁴ (1983)); introduction of the polynucleotides of the invention using a gene gun (see, e.g., Ulmer et al., Science 259: 1745 (1993); introducing nucleic acid constructs into embryonic pleuripotent stem cells and transferring the stem cells back into the blastocyst; and sperm mediated gene transfer (Lavitrano et al., Cell 57: 717-723 (1989). For a review of such techniques, see Gordon, “Transgenic Animals,” Intl. Rev. Cytol. 115: 171-229 (1989).

[0702] Any technique known in the art may be used to produce transgenic clones containing polynucleotides of the invention, for example, nuclear transfer into enucleated oocytes of nuclei from cultured embryonic, fetal, or adult cells induced to quiescence (Campell et al., Nature 380: 64-66 (1996); Wilmut et al., Nature 385: 810813 (1997)).

[0703] The present invention provides for transgenic animals that carry the transgene in all their cells, as well as animals which carry the transgene in some, but not all their cells, I. e., mosaic animals or chimeric. The transgene may be integrated as a single transgene or as multiple copies such as in concatamers, e.g., head-to-head tandems or head-to-tail tandems. The transgene may also be selectively introduced into and activated in a particular cell type by following, for example, the teaching of Lasko et al. (Lasko et al., Proc. Natl. Acad. Sci. USA 89: 6232-6236 (1992)). The regulatory sequences required for such a cell-type specific activation will depend upon the particular cell type of interest, and will be apparent to those of skill in the art. When it is desired that the polynucleotide transgene be integrated into the chromosomal site of the endogenous gene, gene targeting is preferred. Briefly, when such a technique is to be utilized, vectors containing some nucleotide sequences homologous to the endogenous gene are designed for the purpose of integrating, via homologous recombination with chromosomal sequences, into and disrupting the function of the nucleotide sequence of the endogenous gene. The transgene may also be selectively introduced into a particular cell type, thus inactivating the endogenous gene in only that cell type, by following, for example, the teaching of Gu et al. (Gu et al., Science 265: 103-106 (1994)). The regulatory sequences required for such a cell-type specific inactivation will depend upon the particular cell type of interest, and will be apparent to those of skill in the art.

[0704] Once transgenic animals have been generated, the expression of the recombinant gene may be assayed utilizing standard techniques. Initial screening may be accomplished by Southern blot analysis or PCR techniques to analyze animal tissues to verify that integration of the transgene has taken place. The level of mRNA expression of the transgene in the tissues of the transgenic animals may also be assessed using techniques which include, but are not limited to, Northern blot analysis of tissue samples obtained from the animal, in situ hybridization analysis, and reverse transcriptase-PCR (rt-PCR). Samples of transgenic gene-expressing tissue may also be evaluated immunocytochemically or immunohistochemically using antibodies specific for the transgene product.

[0705] Once the founder animals are produced, they may be bred, inbred, outbred, or crossbred to produce colonies of the particular animal. Examples of such breeding strategies include, but are not limited to: outbreeding of founder animals with more than one integration site in order to establish separate lines; inbreeding of separate lines in order to produce compound transgenics that express the transgene at higher levels because of the effects of additive expression of each transgene; crossing of heterozygous transgenic animals to produce animals homozygous for a given integration site in order to both augment expression and eliminate the need for screening of animals by DNA analysis; crossing of separate homozygous lines to produce compound heterozygous or homozygous lines; and breeding to place the transgene on a distinct background that is appropriate for an experimental model of interest.

[0706] Transgenic animals of the invention have uses which include, but are not limited to, animal model systems useful in elaborating the biological function of polypeptides of the present invention, studying conditions and/or disorders associated with aberrant expression, and in screening for compounds effective in ameliorating such conditions and/or disorders.

### Example 14

### Knock-Out Animals

[0707] Endogenous gene expression can also be reduced by inactivating or “knocking out” the gene and/or its promoter using targeted homologous recombination. (E. g., see Smithies et al., Nature 317: 230-234 (1985); Thomas & Capecchi, Cell 51: 503512 (1987); Thompson et al., Cell 5: 313-321 (1989)) Alternatively, RNAi technology may be used. For example, a mutant, non-functional polynucleotide of the invention (or a completely unrelated DNA sequence) flanked by DNA homologous to the endogenous polynucleotide sequence (either the coding regions or regulatory regions of the gene) can be used, with or without a selectable marker and/or a negative selectable marker, to transfect cells that express polypeptides of the invention in vivo. In another embodiment, techniques known in the art are used to generate knockouts; in cells that contain, but do not express the gene of interest. Insertion of the DNA construct, via targeted homologous recombination, results in inactivation of the targeted gene. Such approaches are particularly suited in research and agricultural fields where modifications to embryonic stem cells can be used to generate animal offspring with an inactive targeted gene (e.g., see Thomas & Capecchi 1987 and Thompson 1989, supra). However, this approach can be routinely adapted for use in humans provided the recombinant DNA constructs are directly administered or targeted to the required site in vivo using appropriate viral vectors that will be apparent to those of skill in the art.

[0708] In further embodiments of the invention, cells that are genetically engineered to express the polypeptides of the invention, or alternatively, that are genetically engineered not to express the polypeptides of the invention (e.g., knockouts) are administered to a patient in vivo. Such cells may be obtained from the patient (i.e., animal, including human) or an MHC compatible donor and can include, but are not limited to fibroblasts, bone marrow cells, blood cells (e.g., lymphocytes), adipocytes, muscle cells, endothelial cells etc. The cells are genetically engineered in vitro using recombinant DNA techniques to introduce the coding sequence of polypeptides of the invention into the cells, or alternatively, to disrupt the coding sequence and/or endogenous regulatory sequence associated with the polypeptides of the invention, e.g., by transduction (using viral vectors, and preferably vectors that integrate the transgene into the cell genome) or transfection procedures, including, but not limited to, the use of plasmids, cosmids, YACs, naked DNA, electroporation, liposomes, etc.

[0709] The coding sequence of the polypeptides of the invention can be placed under the control of a strong constitutive or inducible promoter or promoter/enhancer to achieve expression, and preferably secretion, of the polypeptides of the invention. The engineered cells which express and preferably secrete the polypeptides of the invention can be introduced into the patient systemically, e.g., in the circulation, or intraperitoneally.

[0710] Alternatively, the cells can be incorporated into a matrix and implanted in the body, e.g., genetically engineered fibroblasts can be implanted as part of a skin graft; genetically engineered endothelial cells can be implanted as part of a lymphatic or vascular graft. (See, for example, Anderson et al. U.S. Pat. No. 5,399,349 and Mulligan & Wilson, U.S. Pat. No. 5,460,959, the contents of which are hereby incorporated by reference herein in (heir entirety).

[0711] When the cells to be administered are non-autologous or non-MHC compatible cells, they can be administered using well known techniques which prevent the development of a host immune response against the introduced cells. For example, the cells may be introduced in an encapsulated form which, while allowing for an exchange of components with the immediate extracellular environment, does not allow the introduced cells to be recognized by the host immune system.

[0712] Transgenic and “knock-out” animals of the invention have uses which include, but are not limited to, animal model systems useful in elaborating the biological function of polypeptides of the present invention, studying conditions and/or disorders associated with aberrant expression, and in screening for compounds effective in ameliorating such conditions and/or disorders.

[0713] While preferred illustrative embodiments of the present invention are described, one skilled in the art will appreciate that the present invention can be practiced by other than the described embodiments, which are presented for purposes of illustration only and not by way of limitation. The present invention is limited only by the claims that follow.

1. An isolated nucleic acid molecule comprising:
(a) a nucleic acid molecule comprising a nucleic acid sequence that encodes an amino acid sequence of SEQ ID NO: 142-361;
(b) a nucleic acid molecule comprising a nucleic acid sequence of SEQ ID NO: 1-141;
(c) a nucleic acid molecule that selectively hybridizes to the nucleic acid molecule of (a) or (b); or
(d) a nucleic acid molecule having at least 95% sequence identity to the nucleic acid molecule of (a) or (b).

2. The nucleic acid molecule according to claim 1, wherein the nucleic acid molecule is a cDNA.

3. The nucleic acid molecule according to claim 1, wherein the nucleic acid molecule is genomic DNA.

4. The nucleic acid molecule according to claim 1, wherein the nucleic acid molecule is an RNA.

5. The nucleic acid molecule according to claim 1, wherein the nucleic acid molecule is a mammalian nucleic acid molecule.

6. The nucleic acid molecule according to claim 5, wherein the nucleic acid molecule is a human nucleic acid molecule.

7. A method for determining the presence of a cancer specific nucleic acid (CaSNA) in a sample, comprising the steps of:
(a) contacting the sample with a nucleic acid molecule of claim 1 under conditions in which the nucleic acid molecule will selectively hybridize to a cancer specific nucleic acid; and
(b) detecting hybridization of the nucleic acid molecule to a CaSNA in the sample, wherein the detection of the hybridization indicates the presence of a CaSNA in the sample.

8. A vector comprising the nucleic acid molecule of claim 1.

9. A host cell comprising the vector according to claim 8.

10. A method for producing a polypeptide encoded by the nucleic acid molecule according to claim 1, comprising the steps of:
(a) providing a host cell comprising the nucleic acid molecule operably linked to one or more expression control sequences, and
(b) incubating the host cell under conditions in which the polypeptide is produced.

11. A polypeptide encoded by the nucleic acid molecule according to claim 1.

12. An isolated polypeptide selected from the group consisting of:
(a) a polypeptide comprising an amino acid sequence with at least 95% sequence identity to of SEQ ID NO: 142-361; or
(b) a polypeptide comprising an amino acid sequence encoded by a nucleic acid molecule having at least 95% sequence identity to a nucleic acid molecule comprising a nucleic acid sequence of SEQ ID NO: 1-141.

13. An antibody or fragment thereof that specifically binds to a polypeptide of claim 12.

14. A method for determining the presence of a cancer specific protein in a sample, comprising the steps of:
(a) contacting the sample with a suitable reagent under conditions in which the reagent will selectively interact with the cancer specific protein comprising the isolated polypeptide of claim 12; and
(b) detecting the interaction of the reagent with a cancer specific protein in the sample, wherein the detection of binding indicates the presence of a cancer specific protein in the sample.

15. A method for diagnosing or monitoring the presence and metastases of breast, colon, lung, ovarian or prostate cancer in a patient, comprising the steps of:
(a) determining an amount of:
(i) a nucleic acid molecule of claim 1;
(ii) a polypeptide comprising an amino acid sequence with at least 95% sequence identity to of SEQ ID NO: 142-361; or
(iii) a polypeptide comprising an amino acid sequence encoded by a nucleic acid molecule having at least 95% sequence identity to a nucleic acid molecule comprising a nucleic acid sequence of SEQ ID NO: 1-141 and;
(b) comparing the amount of the determined nucleic acid molecule or the polypeptide in the sample of the patient to the amount of the cancer specific marker in a normal control; wherein a difference in the amount of the nucleic acid molecule or the polypeptide in the sample compared to the amount of the nucleic acid molecule or the polypeptide in the normal control is associated with the presence of breast, colon, lung, ovarian or prostate cancer.

16. A kit for detecting a risk of cancer or presence of cancer in a patient, said kit comprising a means for determining the presence of:
(a) a nucleic acid molecule of claim 1;
(b) a polypeptide comprising an amino acid sequence with at least 95% sequence identity to of SEQ ID NO: 142-361; or
(c) a polypeptide comprising an amino acid sequence encoded by a nucleic acid molecule having at least 95% sequence identity to a nucleic acid molecule comprising a nucleic acid sequence of SEQ ID NO: 1-141.

17. A method of treating a patient with breast, colon, lung, ovarian or prostate cancer, comprising the step of administering a composition consisting of:
(a) a nucleic acid molecule of claim 1;
(b) a polypeptide comprising an amino acid sequence with at least 95% sequence identity to of SEQ ID NO: 142-361; or
(c) a polypeptide comprising an amino acid sequence encoded by a nucleic acid molecule having at least 95% sequence identity to a nucleic acid molecule comprising a nucleic acid sequence of SEQ ID NO: 1-141;
to a patient in need thereof, wherein said administration induces an immune response against the breast, colon, lung, ovarian or prostate cancer cell expressing the nucleic acid molecule or polypeptide.

18. A vaccine comprising the polypeptide or the nucleic acid encoding the polypeptide of claim 12.

The application's sequence listing, which the Patent Office published only in electronic form, follows.

SEQUENCE LISTING (379 sequences)

SEQ ID NO: 1 - DNA, 1807 bp, Homo sapien
gcacgagggaagagggtgatccgacccggggaaggtcgctgggcagggcgagttgggaaagcggcagcccccgccgcccccgcagccccttctcctcctttctcccacgtcctatctgcctctcgctggaggccaggccgtgcagcatcgaagacaggaggaactggagcctcattggccggcccggggcgccggcctcgggcttaaataggagctccgggctctggctgggacccgaccgctgccggccgcgctcccgctgctcctgccgggtgatggaaaaccccagcccggccgccgccctgggcaaggccctctgcgctctcctcctggccactctcggcgccgccggccagcctcttgggggagagtccatctgttccgccagagccccggccaaatacagcatcaccttcacgggcaagtggagccagacggccttccccaagcagtaccccctgttccgcccccctgcgcagtggtcttcgctgctgggggccgcgcatagctccgactacagcatgtggaggaagaaccagtacgtcagtaacgggctgcgcgactttgcggagcgcggcgaggcctgggcgctgatgaaggagatcgaggcggcgggggaggcgctgcagagcgtgcacgcggtgttttcggcgcccgccgtccccagcggcaccgggcagacgtcggcggagctggaggtgcagcgcaggcactcgctggtctcgtttgtggtgcgcatcgtgcccagccccgactggttcgtgggcgtggacagcctggacctgtgcgacggggaccgttggcgggaacaggcggcgctggacctgtacccctacgacgccgggacggacagcggcttcaccttctcctcccccaacttcgccaccatcccgcaggacacggtgaccgagataacgtcctcctctcccagccacccggccaactccttctactacccgcggctgaaggccctgcctcccatcgccagggtgacactggtgcggctgcgacagagccccagggccttcatccctcccgccccagtcctgcccagcagggacaatgagattgtagacagcgcctcagttccagaaacgccgctggactgcgaggtctccctgtggtcgtcctggggactgtgcggaggccactgtgggaggctcgggaccaagagcaggactcgctacgtccgggtccagcccgccaacaacgggagcccctgccccgagctcgaagaagaggctgagtgcgtccctgataactgcgtctaagaccagagccccgcagcccctggggcccccggagccatggggtgtcgggggctcctgtgcaggctcatgctgcaggcggccgaggcacagggggtttcgcgctgctcctgaccgcggtgaggccgcgccgaccatctctgcactgaagggccctctggtggccggcacgggcattgggaaacagcctcctcctttcccaaccttgcttcttaggggcccccgtgtcccgtctgctctcagcctcctcctcctgcaggataaagtcatccccaaggctccagctactctaaattatggtctccttataagttattgctgctccaggagattgtccttcatcgtccaggggcctggctcccacgtggttgcagatacctcagacctggtgctctaggctgtgctgagcccactctcccgagggcgcatccaagcgggggccacttgagaagtgaataaatggggcggtttcggaagcgtcagtgtttccatgttatggatctctctgcgtttgaataaagactatctctgttgctcac

SEQ ID NO: 2 - DNA, 3393 bp, Homo sapien
gggagggataggacggggagacaaagaaaggggtgcggcagcactgccaggggaagagggtgatccgacccggggaaggtcgctgggcagggcgagttgggaaagcggcagcccccgccgcccccgcagccccttctcctcctttctcccacgtcctatctgcctctcgctggaggccaggccgtgcagcatcgaagacaggaggaactggagcctcattggccggcccggggcgccggcctcgggcttaaataggagctccgggctctggctgggacccgaccgctgccggccgcgctcccgctgctcctgccgggtgatggaaaaccccagcccggccgccgccctgggcaaggccctctgcgctctcctcctggccactctcggcgccgccggccagcctcttgggggagagtccatctgttccgccagagccccggccaaatacagcatcaccttcacgggcaagtggagccagacggccttccccaagcagtaccccctgttccgcccccctgcgcagtggtcttcgctgctgggggccgcgcatagctccgactacagcatgtggaggaagaaccagtacgtcagtaacgggctgcgcgactttgcggagcgcggcgaggcctgggcgctgatgaaggagatcgaggcggcgggggaggcgctgcagagcgtgcacgaggtgttttcggcgcccgccgtccccagcggcaccgggcagacgtcggcggagctggaggtgcagcgcaggcactcgctggtctcgtttgtggtgcgcatcgtgcccagccccgactggttcgtgggcgtggacagcctggacctgtgcgacggggaccgttggcgggaacaggcggcgctggacctgtacccctacgacgccgggacggacagcggcttcaccttctcctcccccaacttcgccaccatcccgcaggacacggtgaccgagataacgtcctcctctcccagccacccggccaactccttctactacccgcggctgaaggccctgcctcccatcgccagggtgacactgctgcggctgcgacagagccccagggccttcatccctcccgccccagtcctgcccagcagggacaatgagattgtagacagcgcctcaggtaacggacatacaggtcacatgggacacacagcagccccgaaccctgccacagggcgaccaccaaacccgaacctaaggctctgagaaattccaagtagggattcgtagtgcgtactgcaagatggtgcctagaagatttaggattctgttgattcacacactgaagatgtgactcttgcacattatttgcagttgaaagcatcttacagggccacagcccagaggaaagaatgaaaggaggctccagacagtacctgagagactctgtcctgtcagacacgcacccacaggtgacctgtgtgtcacagctgacaaggaagcttgctaggatggccctgtgtggccaccgggtgacagctatgctgcagggcacctgtgggggtctcgggacccagccaccacacagctcggggctctgctcacaggcgccttggcctggggcggggcaggtgctgatgagcattctcctagctcttccaggcacctgctggacagggcaggctgggaacgctggggccgagtggcagttccctccctactcagctgggtggcagccactggcctcacggagcgcctgtggtctggagcgcattgctgggtcgtgggtcagggcctgttggctctgggtctctgggtctcacctgatatgggtgtgggacagtcagtgtaggccccagacaacagcggacttcagactttcccgaggaggaactggagcccaccaacctggccatgggccccgtcgtcctccaccctccatgttgctggctggagttgaggcaggtacggggccgccccacacctgccccccaagccatgtggtagggacagatgtcgtcttgaggagcagcagtaattacaagcttactgtcagccgtccctggaagcaagggccaggtcaggtcagacaggaggccgcctggctggcgggaaccactccccagacagagactgtgcccagtcctgggtccctcctcatttgggatgaactgggcctccctgtgccagcctcggtgctgcccctgcccagtgcaggcttgggctcctcactcatttgtccacgcggatgccccattccaagcagatgtccccgagccacttacccaacaggcagacgtgccagcactgttcgtggtgtgcaactggtctggcgggaagagcccctcgtgggcagagggtccagagaggtgcggtttgccccacatttgggggcactgggccacagtgggcaggggagcacgtggccagtgccctgggtctgccacgatgtgggagttccaccaccacagggacttgagcggcagctccggctcttacgtagaaacgcgcaactccagtccctaggttgtgtccgaggttgctatggtgccatcccatcttgccgctcactctgcgactgtgcggagaaacgcaagtgcccccgaagggtgggcgtggcctctgatgaatgcacacgttggtgggaggtggcttccgtttgtacgaagcgcctcttcacgcgagcgttcacctcggtctcccctttgcttggtccagttccagaaacgccgctggactgcgaggtctccctgtggtcgtcctggggactgtgcggaggccactgtgggaggctcgggaccaagagcaggactcgctacgtccgggtccagcccgccaacaacgggagcccctgccccgagctcgaagaagaggctgagtgcgtccctgataactgcgtctaagaccagagccccgcagcccctggggccccccggagccatggggtgtcgggggctcctgtgcaggctcatgctgcaggcggccgagggcacagggggtttcgcgctgctcctgaccgcggtgaggccgcgccgaccatctctgcactgaagggccctctggtggccggcacgggcattgggaaacagcctcctcctttcccaaccttgcttcttaggggcccccgtgtcccgtctgctctcagcctcctcctcctgcaggataaagtcatccccaaggctccagctactctaaattatgtctccttataagttattgctgctccaggagattgtccttcatcgtccaggggcctggctcccacgtggttgcagatacctcagacctggtgctctaggctgtgctgagcccactctcccgagggcgcatccaagcgggggccacttgagaagtgaataaatggggcggtttcggaagcgtcagtgtttccatgttatggatctctctgcgtttgaataaagactatctctgttgctcaaaaa

SEQ ID NO: 3 - DNA, 4344 bp, Homo sapien
gggagggataggacggggagacaaagaaaggggtgcggcagcactgccaggggaagagggtgatccgacccggggaaggtcgctgggcagggcgagttgggaaagcggcagcccccgccgcccccgcagccccttctcctcctttctcccacgtcctatctgcctctcgctggaggccaggccgtgcagcatcgaagacaggaggaactggagcctcattggccggcccggggcgccggcctcgggcttaaataggagctccgggctctggctgggacccgaccgctgccggccgcgctcccgctgctcctgccgggtgatggaaaaccccagcccggccgccgccctgggcaaggccctctgcgctctcctcctggccactctcggcgccgccggccagcctcttgggggagagtccatctgttccgccagagccccggccaaatacagcatcaccttcacgggcaagtggagccagacggccttccccaagcagtaccccctgttccgcccccctgcgcagtggtcttcgctgctgggggccgcgcatagctccgactacagcatgtggaggaagaaccagtacgtcagtaacgggctgcgcgactttgcggagcgcggcgaggcctgggcgctgatgaaggagatcgaggcggcgggggaggcgctgcagagcgtgcacgaggtgttttcggcgcccgccgtccccagcggcaccgggcagacgtcggcggagctggaggtgcagcgcaggcactcgctggtctcgtttgtggtgcgcatcgtgcccagccccgactggttcgtgggcgtggacagcctggacctgtgcgacggggaccgttggcgggaacaggcggcgctggacctgtacccctacgacgccgggacggacagcggcttcaccttctcctcccccaacttcgccaccatcccgcaggacacggtgaccgagataacgtcctcctctcccagccacccggccaactccttctactacccgcggctgaaggccctgcctcccatcgccagggtgacactgctgcggctgcgacagagccccagggccttcatccctcccgccccagtcctgcccagcagggacaatgagattgtagacagcgcctcaggtaacggacatacaggtcacatgggacacacagcagccccgaaccctgccacagggcgaccaccaaacccgaacctaaggctctgagaaattccaagtagggattcgtagtgcgtactgcaagatggtgcctagaagatttaggattctgttgattcacacactgaagatgtgactcttgcacattatttgcagttgaaagcatcttacagggccacagcccagaggaaagaatgaaaggaggctccagacagtacctgagagactctgtcctgtcagacacgcacccacaggtgacctgtgtgtcacagctgacaaggaagcttgctaggatggccctgtgtggccaccgggtgacagctatgctgcagggcacctgtgggggtctcgggacccagccaccacacagctcggggctctgctcacaggcgccttggcctggggcggggcaggtgctgatgagcattctcctagctcttccaggcacctgctggacagggcaggctgggaacgctggggccgagtggcagttccctccctactcagctgggtggcagccactggcctcacggagcgcctgtggtctggagcgcattgctgggtcgtgggtcagggcctgttggctctgggtctctgggtctcacctgatatgggtgtgggacagtcagtgtaggccccagacaacagcggacttcagactttcccgaggaggaactggagcccaccaacctggccatgggccccgtcgtcctccaccctccatgttgctggctggagttgaggcaggtacggggccgccccacacctgccccccaagccatgtggtagggacagatgtcgtcttgaggagcagcagtaattacaagcttactgtcagccgtccctggaagcaagggccaggtcaggtcagacaggaggccgcctggctggcgggaaccactccccagacagagactgtgcccagtcctgggtccctcctcatttgggatgaactgggcctccctgtgccagcctcggtgctgcccctgcccagtgcaggcttgggctcctcactcatttgtccacgcggatgccccattccaagcagatgtccccgagccacttacccaacaggcagacgtgccagcactgttcgtggtgtgcaactggtctggcgggaagagcccctcgtgggcagagggtccagagaggtgcggtttgccccacatttgggggcactgggccacagtgggcaggggagcacgtggccagtgccctgggctaggagagggataaagtcagctgtggccaagcagaagcagtattgcaggggaagggtggggagagactgtgctatgagctctgagcaggaggcaggacatggagagaagggtgggagacggacagagccagctgtgccagccgagggaccagagtgggcagtggggacggagcacagaccaccgcccacaagggtctctcctgtgacttctggcttcccgagggcagaggctgggatgggcatgtggcggctggcacccaggaggctccgccaggtccacgccaagccagcctggctcagctctggcttcctgctcacacgctggatgcctgtccccaggcctcctgacagggctctgcagcattggagaggcttgtggtggggccctcgctgtagaacaggcactgccagtgctcactgactcctcattgcagccagggcaggggcgctcccaccacctcggtttcagtcaggaagctggggggtgctgggatctgccagcagctctgtgtgctccccaggtgggctgcccggggccctggctctctggcttctacaccagtgcccctgcgaagcctcagcgcccaaggtctttgcaagccctgttcctgcatctctggagagggctgctccaggtgtgggcctggccagggcttccagaccagtccaggcactgcacctgcacattgacccccttctccactctctctcatccttcagtagccacaaagctggcagcagggtactcgcagatttgtgaggagagccgagcccttgctgactgtcctcccgtgcacggcagagtgaggcggggctcctggcctccttaggggctgcccgctctgggccacacagccagagaaacactgtccatctggctggcttggcctgtggggtgcaaaagaggtgttttcactttgctttggaaacatggaaattaccaagtgacttaaccataacaccaaatgatgatttttaaatttatgaaaattatggaaccagatgggacacagggaaacgagaacgatactgaaaaggtctgagtcctgtggggggtccaggtcccgcaagacagctaatcaggtgcccctgtctgttattcgggtaaatgtagcagctgggtccaggctcgggcagagcagctttctacagcaggggtgtccgccctctcccggggttcccacggggttcccaggggcctcttactctgccacgatgtgggagttccaccaccacagggacttgagcggcagctccggctcttacgtagaaacgcgcaactccagtccctaggttgtgtccgaggttgctatggtgccatcccatcttgccgctcactctgcgactgtgcggagaaacgcaagtgcccccgaagggtgggcgtggcctctgatgaatgcacacgttggtgggaggtggcttccgtttgtacgaagcgcctcttcacgcgagcgttcacctcggtctcccctttgcttggtccagttccagaaacgccgctggactgcgaggtctccctgtggtcgtcctggggactgccgcgccgaccatctctgcactgaagggccctctggtggccggcacgggcattgggaaacagcctcctcctttcccaaccttgcttcttaggggcccccgtgtcccgtctgctctcagcctcctcctcctgcaggataaagtcatccccaaggctccagctactctaaattatgtctccttataagttattgctgctccaggagattgtccttcatcgtccaggggcctggctcccacgtggttgcagatacctcagacctggtgctctaggctgtgctgagcccactctcccgagggcgcatccaagcgggggccacttgagaagtgaataaatggggcggtttcggaagcgtcagtgtttccatgttatggatctctctgcgtttgaataaagactatctctgttgctcaaaaa

SEQ ID NO: 4 - DNA, 4413 bp, Homo sapien
gggagggataggacggggagacaaagaaaggggtgcggcagcactgccaggggaagagggtgatccgacccggggaaggtcgctgggcagggcgagttgggaaagcggcagcccccgccgcccccgcagccccttctcctcctttctcccacgtcctatctgcctctcgctggaggccaggccgtgcagcatcgaagacaggaggaactggagcctcattggccggcccggggcgccggcctcgggcttaaataggagctccgggctctggctgggacccgaccgctgccggccgcgctcccgctgctcctgccgggtgatggaaaaccccagcccggccgccgccctgggcaaggccctctgcgctctcctcctggccactctcggcgccgccggccagcctcttgggggagagtccatctgttccgccagagccccggccaaatacagcatcaccttcacgggcaagtggagccagacggccttccccaagcagtaccccctgttccgcccccctgcgcagtggtcttcgctgctgggggccgcgcatagctccgactacagcatgtggaggaagaaccagtacgtcagtaacgggctgcgcgactttgcggagcgcggcgaggcctgggcgctgatgaaggagatcgaggcggcgggggaggcgctgcagagcgtgcacgaggtgttttcggcgcccgccgtccccagcggcaccgggcagacgtcggcggagctggaggtgcagcgcaggcactcgctggtctcgtttgtggtgcgcatcgtgcccagccccgactggttcgtgggcgtggacagcctggacctgtgcgacggggaccgttggcgggaacaggcggcgctggacctgtacccctacgacgccgggacggacagcggcttcaccttctcctcccccaacttcgccaccatcccgcaggacacggtgaccgagataacgtcctcctctcccagccacccggccaactccttctactacccgcggctgaaggccctgcctcccatcgccagggtgacactgctgcggctgcgacagagccccagggccttcatccctcccgccccagtcctgcccagcagggacaatgagattgtagacagcgcctcaggtaacggacatacaggtcacatgggacacacagcagccccgaaccctgccacagggcgaccaccaaacccgaacctaaggctctgagaaattccaagtagggattcgtagtgcgtactgcaagatggtgcctagaagatttaggattctgttgattcacacactgaagatgtgactcttgcacattatttgcagttgaaagcatcttacagggccacagcccagaggaaagaatgaaaggaggctccagacagtacctgagagactctgtcctgtcagacacgcacccacaggtgacctgtgtgtcacagctgacaaggaagcttgctaggatggccctgtgtggccaccgggtgacagctatgctgcagggcacctgtgggggtctcgggacccagccaccacacagctcggggctctgctcacaggcgccttggcctggggcggggcaggtgctgatgagcattctcctagctcttccaggcacctgctggacagggcaggctgggaacgctggggccgagtggcagttccctccctactcagctgggtggcagccactggcctcacggagcgcctgtggtctggagcgcattgctgggtcgtgggtcagggcctgttggctctgggtctctgggtctcacctgatatgggtgtgggacagtcagtgtaggccccagacaacagcggacttcagactttcccgaggaggaactggagcccaccaacctggccatgggccccgtcgtcctccaccctccatgttgctggctggagttgaggcaggtacggggccgccccacacctgccccccaagccatgtggtagggacagatgtcgtcttgaggagcagcagtaattacaagcttactgtcagccgtccctggaagcaagggccaggtcaggtcagacaggaggccgcctggctggcgggaaccactccccagacagagactgtgcccagtcctgggtccctcctcatttgggatgaactgggcctccctgtgccagcctcggtgctgcccctgcccagtgcaggcttgggctcctcactcatttgtccacgcggatgccccattccaagcagatgtccccgagccacttacccaacaggcagacgtgccagcactgttcgtggtgtgcaactggtctggcgggaagagcccctcgtgggcagagggtccagagaggtgcggtttgccccacatttgggggcactgggccacagtgggcaggggagcacgtggccagtgccctgggctaggagagggataaagtcagctgtggccaagcagaagcagtattgcaggggaagggtggggagagactgtgctatgagctctgagcaggaggcaggacatggagagaagggtgggagacggacagagccagctgtgccagccgagggaccagagtgggcagtggggacggagcacagaccaccgcccacaagggtctctcctgtgacttctggcttcccgagggcagaggctgggatgggcatgtggcggctggcacccaggaggctccgccaggtccacgccaagccagcctggctcagctctggcttcctgctcacacgctggatgcctgtccccaggcctcctgacagggctctgcagcattggagaggcttgtggtggggccctcgctgtagaacaggcactgccagtgctcactgactcctcattgcagccagggcaggggcgctcccaccacctcggtttcagtcaggaagctggggggtgctgggatctgccagcagctctgtgtgctccccaggtgggctgcccggggccctggctctctggcttctacaccagtgcccctgcgaagcctcagcgcccaaggtctttgcaagccctgttcctgcatctctggagagggctgctccaggtgtgggcctggccagggcttccagaccagtccaggcactgcacctgcacattgacccccttctccactctctctcatccttcagtagccacaaagctggcagcagggtactcgcagatttgtgaggagagccgagcccttgctgactgtcctcccgtgcacggcagagtgaggcggggctcctggcctccttaggggctgcccgctctgggccacacagccagagaaacactgtccatctggctggcttggcctgtggggtgcaaaagaggtgttttcactttgctttggaaacatggaaattaccaagtgacttaaccataacaccaaatgatgatttttaaatttatgaaaattatggaaccagatgggacacagggaaacgagaacgatactgaaaaggtctgagtcctgtggggggtccaggtcccgcaagacagctaatcaggtgcccctgtctgttattcgggtaaatgtagcagctgggtccaggctcgggcagagcagctttctacagcaggggtgtccgccctctcccggggttcccacggggttcccaggggcctcttactctgccacgatgtgggagttccaccaccacagggacttgagcggcagctccggctcttacgtagaaacgcgcaactccagtccctaggttgtgtccgaggttgctatggtgccatcccatcttgccgctcactctgcgactgtgcggagaaacgcaagtgcccccgaagggtgggcgtggcctctgatgaatgcacacgttggtgggaggtggcttccgtttgtacgaagcgcctcttcacgcgagcgttcacctcggtctcccctttgcttggtccagttccagaaacgccgctggactgcgaggtctccctgtggtcgtcctggggactgtgcggaggccactgtgggaggctcgggaccaagagcaggactcgctacgtccgggtccagcccgccaacaacgggagcccctgccccgagctcgaagaagtctggtggccggcacgggcattgggaaacagcctcctcctttcccaaccttgcttcttaggggcccccgtgtcccgtctgctctcagcctcctcctcctgcaggataaagtcatccccaaggctccagctactctaaattatgtctccttataagttattgctgctccaggagattgtccttcatcgtccaggggcctggctcccacgtggttgcagatacctcagacctggtgctctaggctgtgctgagcccactctcccgagggcgcatccaagcgggggccacttgagaagtgaataaatggggcggtttcggaagcgtcagtgtttccatgttatggatctctctgcgtttgaataaagactatctctgttgctcaaaaa

SEQ ID NO: 5 - DNA, 4329 bp, Homo sapien
gggagggataggacggggagacaaagaaaggggtgcggcagcactgccaggggaagagggtgatccgacccggggaaggtcgctgggcagggcgagttgggaaagcggcagcccccgccgcccccgcagccccttctcctcctttctcccacgtcctatctgcctctcgctggaggccaggccgtgcagcatcgaagacaggaggaactggagcctcattggccggcccggggcgccggcctcgggcttaaataggagctccgggctctggctgggacccgaccgctgccggccgcgctcccgctgctcctgccgggtgatggaaaaccccagcccggccgccgccctgggcaaggccctctgcgctctcctcctggccactctcggcgccgccggccagcctcttgggggagagtccatctgttccgccagagccccggccaaatacagcatcaccttcacgggcaagtggagccagacggccttccccaagcagtaccccctgttccgcccccctgcgcagtggtcttcgctgctgggggccgcgcatagctccgactacagcatgtggaggaagaaccagtacgtcagtaacgggctgcgcgactttgcggagcgcggcgaggcctgggcgctgatgaaggagatcgaggcggcgggggaggcgctgcagagcgtgcacgaggtgttttcggcgcccgccgtccccagcggcaccgggcagacgtcggcggagctggaggtgcagcgcaggcactcgctggtctcgtttgtggtgcgcatcgtgcccagccccgactggttcgtgggcgtggacagcctggacctgtgcgacggggaccgttggcgggaacaggcggcgctggacctgtacccctacgacgccgggacggacagcggcttcaccttctcctcccccaacttcgccaccatcccgcaggacacggtgaccgagataacgtcctcctctcccagccacccggccaactccttctactacccgcggctgaaggccctgcctcccatcgccagggtgacactgctgcggctgcgacagagccccagggccttcatccctcccgccccagtcctgcccagcagggacaatgagattgtagacagcgcctcaggtaacggacatacaggtcacatgggacacacagcagccccgaaccctgccacagggcgaccaccaaacccgaacctaaggctctgagaaattccaagtagggattcgtagtgcgtactgcaagatggtgcctagaagatttaggattctgttgattcacacactgaagatgtgactcttgcacattatttgcagttgaaagcatcttacagggccacagcccagaggaaagaatgaaaggaggctccagacagtacctgagagactctgtcctgtcagacacgcacccacaggtgacctgtgtgtcacagctgacaaggaagcttgctaggatggccctgtgtggccaccgggtgacagctatgctgcagggcacctgtgggggtctcgggacccagccaccacacagctcggggctctgctcacaggcgccttggcctggggcggggcaggtgctgatgagcattctcctagctcttccaggcacctgctggacagggcaggctgggaacgctggggccgagtggcagttccctccctactcagctgggtggcagccactggcctcacggagcgcctgtggtctggagcgcattgctgggtcgtgggtcagggcctgttggctctgggtctctgggtctcacctgatatgggtgtgggacagtcagtgtaggccccagacaacagcggacttcagactttcccgaggaggaactggagcccaccaacctggccatgggccccgtcgtcctccaccctccatgttgctggctggagttgaggcaggtacggggccgccccacacctgccccccaagccatgtggtagggacagatgtcgtcttgaggagcagcagtaattacaagcttactgtcagccgtccctggaagcaagggccaggtcaggtcagacaggaggccgcctggctggcgggaaccactccccagacagagactgtgcccagtcctgggtccctcctcatttgggatgaactgggcctccctgtgccagcctcggtgctgcccctgcccagtgcaggcttgggctcctcactcatttgtccacgcggatgccccattccaagcagatgtccccgagccacttacccaacaggcagacgtgccagcactgttcgtggtgtgcaactggtctggcgggaagagcccctcgtgggcagagggtccagagaggtgcggtttgccccacatttgggggcactgggccacagtgggcaggggagcacgtggccagtgccctgggctaggagagggataaagtcagctgtggccaagcagaagcagtattgcaggggaagggtggggagagactgtgctatgagctctgagcaggaggcaggacatggagagaagggtgggagacggacagagccagctgtgccagccgagggaccagagtgggcagtggggacggagcacagaccaccgcccacaagggtctctcctgtgacttctggcttcccgagggcagaggctgggatgggcatgtggcggctggcacccaggaggctccgccaggtccacgccaagccagcctggctcagctctggcttcctgctcacacgctggatgcctgtccccaggcctcctgacagggctctgcagcattggagaggcttgtggtggggccctcgctgtagaacaggcactgccagtgctcactgactcctcattgcagccagggcaggggcgctcccaccacctcggtttcagtcaggaagctggggggtgctgggatctgccagcagctctgtgtgctccccaggtgggctgcccggggccctggctctctggcttctacaccagtgcccctgcgaagcctcagcgcccaaggtctttgcaagccctgttcctgcatctctggagagggctgctccaggtgtgggcctggccagggcttccagaccagtccaggcactgcacctgcacattgacccccttctccactctctctcatccttcagtagccacaaagctggcagcagggtactcgcagatttgtgaggagagccgagcccttgctgactgtcctcccgtgcacggcagagtgaggcggggctcctggcctccttaggggctgcccgctctgggccacacagccagagaaacactgtccatctggctggcttggcctgtggggtgcaaaagaggtgttttcactttgctttggaaacatggaaattaccaagtgacttaaccataacaccaaatgatgatttttaaatttatgaaaattatggaaccagatgggacacagggaaacgagaacgatactgaaaaggtctgagtcctgtggggggtccaggtcccgcaagacagctaatcaggtgcccctgtctgttattcgggtaaatgtagcagctgggtccaggctcgggcagagcagctttctacagcaggggtgtccgccctctcccggggttcccacggggttcccaggggcctcttactctgccacgatgtgggagttccaccaccacagggacttgagcggcagctccggctcttacgtagaaacgcgcaactccagtccctaggttgtgtccgaggttgctatggtgccatcccatcttgccgctcactctgcgactgtgcggagaaacgcaagtgcccccgaagggtgggcgtggcctctgatgaatgcacacgttggtgggaggtggcttccgtttgtacgaagcgcctcttcacgcgagcgttcacctcggtctcccctttgcttggtccagttccagaaacgccgctggactgcgaggtctccctgtggtcgtcctggggactgtgcggaggccactgtgggaggctcgggaccaagagcaggactcgctacgtccgggtccagcaaccttgcttcttaggggcccccgtgtcccgtctgctctcagcctcctcctcctgcaggataaagtcatccccaaggctccagctactctaaattatgtctccttataagttattgctgctccaggagattgtccttcatcgtccaggggcctggctcccacgtggttgcagatacctcagacctggtgctctaggctgtgctgagcccactctcccgagggcgcatccaagcgggggccacttgagaagtgaataaatggggcggtttcggaagcgtcagtgtttccatgttatggatctctctgcgtttgaataaagactatctctgttgctcaaaaa

SEQ ID NO: 6 - DNA, 4524 bp, Homo sapien
gggagggataggacggggagacaaagaaaggggtgcggcagcactgccaggggaagagggtgatccgacccggggaaggtcgctgggcagggcgagttgggaaagcggcagcccccgccgcccccgcagccccttctcctcctttctcccacgtcctatctgcctctcgctggaggccaggccgtgcagcatcgaagacaggaggaactggagcctcattggccggcccggggcgccggcctcgggcttaaataggagctccgggctctggctgggacccgaccgctgccggccgcgctcccgctgctcctgccgggtgatggaaaaccccagcccggccgccgccctgggcaaggccctctgcgctctcctcctggccactctcggcgccgccggccagcctcttgggggagagtccatctgttccgccagagccccggccaaatacagcatcaccttcacgggcaagtggagccagacggccttccccaagcagtaccccctgttccgcccccctgcgcagtggtcttcgctgctgggggccgcgcatagctccgactacagcatgtggaggaagaaccagtacgtcagtaacgggctgcgcgactttgcggagcgcggcgaggcctgggcgctgatgaaggagatcgaggcggcgggggaggcgctgcagagcgtgcacgaggtgttttcggcgcccgccgtccccagcggcaccgggcagacgtcggcggagctggaggtgcagcgcaggcactcgctggtctcgtttgtggtgcgcatcgtgcccagccccgactggttcgtgggcgtggacagcctggacctgtgcgacggggaccgttggcgggaacaggcggcgctggacctgtacccctacgacgccgggacggacagcggcttcaccttctcctcccccaacttcgccaccatcccgcaggacacggtgaccgagataacgtcctcctctcccagccacccggccaactccttctactacccgcggctgaaggccctgcctcccatcgccagggtgacactgctgcggctgcgacagagccccagggccttcatccctcccgccccagtcctgcccagcagggacaatgagattgtagacagcgcctcaggtaacggacatacaggtcacatgggacacacagcagccccgaaccctgccacagggcgaccaccaaacccgaacctaaggctctgagaaattccaagtagggattcgtagtgcgtactgcaagatggtgcctagaagatttaggattctgttgattcacacactgaagatgtgactcttgcacattatttgcagttgaaagcatcttacagggccacagcccagaggaaagaatgaaaggaggctccagacagtacctgagagactctgtcctgtcagacacgcacccacaggtgacctgtgtgtcacagctgacaaggaagcttgctaggatggccctgtgtggccaccgggtgacagctatgctgcagggcacctgtgggggtctcgggacccagccaccacacagctcggggctctgctcacaggcgccttggcctggggcggggcaggtgctgatgagcattctcctagctcttccaggcacctgctggacagggcaggctgggaacgctggggccgagtggcagttccctccctactcagctgggtggcagccactggcctcacggagcgcctgtggtctggagcgcattgctgggtcgtgggtcagggcctgttggctctgggtctctgggtctcacctgatatgggtgtgggacagtcagtgtaggccccagacaacagcggacttcagactttcccgaggaggaactggagcccaccaacctggccatgggccccgtcgtcctccaccctccatgttgctggctggagttgaggcaggtacggggccgccccacacctgccccccaagccatgtggtagggacagatgtcgtcttgaggagcagcagtaattacaagcttactgtcagccgtccctggaagcaagggccaggtcaggtcagacaggaggccgcctggctggcgggaaccactccccagacagagactgtgcccagtcctgggtccctcctcatttgggatgaactgggcctccctgtgccagcctcggtgctgcccctgcccagtgcaggcttgggctcctcactcatttgtccacgcggatgccccattccaagcagatgtccccgagccacttacccaacaggcagacgtgccagcactgttcgtggtgtgcaactggtctggcgggaagagcccctcgtgggcagagggtccagagaggtgcggtttgccccacatttgggggcactgggccacagtgggcaggggagcacgtggccagtgccctgggctaggagagggataaagtcagctgtggccaagcagaagcagtattgcaggggaagggtggggagagactgtgctatgagctctgagcaggaggcaggacatggagagaagggtgggagacggacagagccagctgtgccagccgagggaccagagtgggcagtggggacggagcacagaccaccgcccacaagggtctctcctgtgacttctggcttcccgagggcagaggctgggatgggcatgtggcggctggcacccaggaggctccgccaggtccacgccaagccagcctggctcagctctggcttcctgctcacacgctggatgcctgtccccaggcctcctgacagggctctgcagcattggagaggcttgtggtggggccctcgctgtagaacaggcactgccagtgctcactgactcctcattgcagccagggcaggggcgctcccaccacctcggtttcagtcaggaagctggggggtgctgggatctgccagcagctctgtgtgctccccaggtgggctgcccggggccctggctctctggcttctacaccagtgcccctgcgaagcctcagcgcccaaggtctttgcaagccctgttcctgcatctctggagagggctgctccaggtgtgggcctggccagggcttccagaccagtccaggcactgcacctgcacattgacccccttctccactctctctcatccttcagtagccacaaagctggcagcagggtactcgcagatttgtgaggagagccgagcccttgctgactgtcctcccgtgcacggcagagtgaggcggggctcctggcctccttaggggctgcccgctctgggccacacagccagagaaacactgtccatctggctggcttggcctgtggggtgcaaaagaggtgttttcactttgctttggaaacatggaaattaccaagtgacttaaccataacaccaaatgatgatttttaaatttatgaaaattatggaaccagatgggacacagggaaacgagaacgatactgaaaaggtctgagtcctgtggggggtccaggtcccgcaagacagctaatcaggtgcccctgtctgttattcgggtaaatgtagcagctgggtccaggctcgggcagagcagctttctacagcaggggtgtccgccctctcccggggttcccacggggttcccaggggcctcttactctgccacgatgtgggagttccaccaccacagggacttgagcggcagctccggctcttacgtagaaacgcgcaactccagtccctaggttgtgtccgaggttgctatggtgccatcccatcttgccgctcactctgcgactgtgcggagaaacgcaagtgcccccgaagggtgggcgtggcctctgatgaatgcacacgttggtgggaggtggcttccgtttgtacgaagcgcctcttcacgcgagcgttcacctcggtctcccctttgcttggtccagttccagaaacgccgctggactgcgaggtctccctgtggtcgtcctggggactgtgcggaggccactgtgggaggctcgggaccaagagcaggactcgctacgtccgggtccagcccgccaacaacgggagcccctgccccgagctcgaagaagaggctgagtgcgtccctgataactgcgtctaagaccagagccccgcagcccctggggccccccggagccatggggtgtcgggggctcctgtgcaggctcatgctgcaggcggccgagggcacagggggtttcgcgctgctcctgaccgcggtgaggccgcgccgaccatctctgcactgaagggccctctggtggccggcacgggcattgggaaacagcctcctcctttcccgctccagctactctaaattatgtctccttataagttattgctgctccaggagattgtccttcatcgtccaggggcctggctcccacgtggttgcagatacctcagacctggtgctctaggctgtgctgagcccactctcccgagggcgcatccaagcgggggccacttgagaagtgaataaatggggcggtttcggaagcgtcagtgtttccatgttatggatctctctgcgtttgaataaagactatctctgttgctcaaaaa

SEQ ID NO: 7 - DNA, 4600 bp, Homo sapien
gggagggataggacggggagacaaagaaaggggtgcggcagcactgccaggggaagagggtgatccgacccggggaaggtcgctgggcagggcgagttgggaaagcggcagcccccgccgcccccgcagccccttctcctcctttctcccacgtcctatctgcctctcgctggaggccaggccgtgcagcatcgaagacaggaggaactggagcctcattggccggcccggggcgccggcctcgggcttaaataggagctccgggctctggctgggacccgaccgctgccggccgcgctcccgctgctcctgccgggtgatggaaaaccccagcccggccgccgccctgggcaaggccctctgcgctctcctcctggccactctcggcgccgccggccagcctcttgggggagagtccatctgttccgccagagccccggccaaatacagcatcaccttcacgggcaagtggagccagacggccttccccaagcagtaccccctgttccgcccccctgcgcagtggtcttcgctgctgggggccgcgcatagctccgactacagcatgtggaggaagaaccagtacgtcagtaacgggctgcgcgactttgcggagcgcggcgaggcctgggcgctgatgaaggagatcgaggcggcgggggaggcgctgcagagcgtgcacgaggtgttttcggcgcccgccgtccccagcggcaccgggcagacgtcggcggagctggaggtgcagcgcaggcactcgctggtctcgtttgtggtgcgcatcgtgcccagccccgactggttcgtgggcgtggacagcctggacctgtgcgacggggaccgttggcgggaacaggcggcgctggacctgtacccctacgacgccgggacggacagcggcttcaccttctcctcccccaacttcgccaccatcccgcaggacacggtgaccgagataacgtcctcctctcccagccacccggccaactccttctactacccgcggctgaaggccctgcctcccatcgccagggtgacactgctgcggctgcgacagagccccagggccttcatccctcccgccccagtcctgcccagcagggacaatgagattgtagacagcgcctcaggtaacggacatacaggtcacatgggacacacagcagccccgaaccctgccacagggcgaccaccaaacccgaacctaaggctctgagaaattccaagtagggattcgtagtgcgtactgcaagatggtgcctagaagatttaggattctgttgattcacacactgaagatgtgactcttgcacattatttgcagttgaaagcatcttacagggccacagcccagaggaaagaatgaaaggaggctccagacagtacctgagagactctgtcctgtcagacacgcacccacaggtgacctgtgtgtcacagctgacaaggaagcttgctaggatggccctgtgtggccaccgggtgacagctatgctgcagggcacctgtgggggtctcgggacccagccaccacacagctcggggctctgctcacaggcgccttggcctggggcggggcaggtgctgatgagcattctcctagctcttccaggcacctgctggacagggcaggctgggaacgctggggccgagtggcagttccctccctactcagctgggtggcagccactggcctcacggagcgcctgtggtctggagcgcattgctgggtcgtgggtcagggcctgttggctctgggtctctgggtctcacctgatatgggtgtgggacagtcagtgtaggccccagacaacagcggacttcagactttcccgaggaggaactggagcccaccaacctggccatgggccccgtcgtcctccaccctccatgttgctggctggagttgaggcaggtacggggccgccccacacctgccccccaagccatgtggtagggacagatgtcgtcttgaggagcagcagtaattacaagcttactgtcagccgtccctggaagcaagggccaggtcaggtcagacaggaggccgcctggctggcgggaaccactccccagacagagactgtgcccagtcctgggtccctcctcatttgggatgaactgggcctccctgtgccagcctcggtgctgcccctgcccagtgcaggcttgggctcctcactcatttgtccacgcggatgccccattccaagcagatgtccccgagccacttacccaacaggcagacgtgccagcactgttcgtggtgtgcaactggtctggcgggaagagcccctcgtgggcagagggtccagagaggtgcggtttgccccacatttgggggcactgggccacagtgggcaggggagcacgtggccagtgccctgggctaggagagggataaagtcagctgtggccaagcagaagcagtattgcaggggaagggtggggagagactgtgctatgagctctgagcaggaggcaggacatggagagaagggtgggagacggacagagccagctgtgccagccgagggaccagagtgggcagtggggacggagcacagaccaccgcccacaagggtctctcctgtgacttctggcttcccgagggcagaggctgggatgggcatgtggcggctggcacccaggaggctccgccaggtccacgccaagccagcctggctcagctctggcttcctgctcacacgctggatgcctgtccccaggcctcctgacagggctctgcagcattggagaggcttgtggtggggccctcgctgtagaacaggcactgccagtgctcactgactcctcattgcagccagggcaggggcgctcccaccacctcggtttcagtcaggaagctggggggtgctgggatctgccagcagctctgtgtgctccccaggtgggctgcccggggccctggctctctggcttctacaccagtgcccctgcgaagcctcagcgcccaaggtctttgcaagccctgttcctgcatctctggagagggctgctccaggtgtgggcctggccagggcttccagaccagtccaggcactgcacctgcacattgacccccttctccactctctctcatccttcagtagccacaaagctggcagcagggtactcgcagatttgtgaggagagccgagcccttgctgactgtcctcccgtgcacggcagagtgaggcggggctcctggcctccttaggggctgcccgctctgggccacacagccagagaaacactgtccatctggctggcttggcctgtggggtgcaaaagaggtgttttcactttgctttggaaacatggaaattaccaagtgacttaaccataacaccaaatgatgatttttaaatttatgaaaattatggaaccagatgggacacagggaaacgagaacgatactgaaaaggtctgagtcctgtggggggtccaggtcccgcaagacagctaatcaggtgcccctgtctgttattcgggtaaatgtagcagctgggtccaggctcgggcagagcagctttctacagcaggggtgtccgccctctcccggggttcccacggggttcccaggggcctcttactctgccacgatgtgggagttccaccaccacagggacttgagcggcagctccggctcttacgtagaaacgcgcaactccagtccctaggttgtgtccgaggttgctatggtgccatcccatcttgccgctcactctgcgactgtgcggagaaacgcaagtgcccccgaagggtgggcgtggcctctgatgaatgcacacgttggtgggaggtggcttccgtttgtacgaagcgcctcttcacgcgagcgttcacctcggtctcccctttgcttggtccagttccagaaacgccgctggactgcgaggtctccctgtggtcgtcctggggactgtgcggaggccactgtgggaggctcgggaccaagagcaggactcgctacgtccgggtccagcccgccaacaacgggagcccctgccccgagctcgaagaagaggctgagtgcgtccctgataactgcgtctaagaccagagccccgcagcccctggggccccccggagccatggggtgtcgggggctcctgtgcaggctcatgctgcaggcggccgagggcacagggggtttcgcgctgctcctgaccgcggtgaggccgcgccgaccatctctgcactgaagggccctctggtggccggcacgggcattgggaaacagcctcctcctttcccaaccttgcttcttaggggcccccgtgtcccgtctgctctcagcctcctcctcctgcaggataaagtcatccccaaggctccagctactctaaattatgtctccttataagttattgctgctccaggagattgtccttcatcgtccaggggcctggctcccacgtggttgcagatacctcagacctggtgctctaggctgtgctgagcccactctcccgagggcgcatccaagcgggggccacttgagaagtgaataaatggggcggtttcggaagcgtcagtgtttccatgttatggatctctctgcgtttgaataaagactatctctgttgctcaaaaa

SEQ ID NO: 8 - DNA, 4413 bp, Homo sapien; identical to SEQ ID NO: 4

SEQ ID NO: 9 - DNA, 1535 bp, Homo sapien
gggagggataggacggggagacaaagaaaggggtgcggcagcactgccaggggaagagggtgatccgacccggggaaggtcgctgggcagggcgagttgggaaagcggcagcccccgccgcccccgcagccccttctcctcctttctcccacgtcctatctgcctctcgctggaggccaggccgtgcagcatcgaagacaggaggaactggagcctcattggccggcccggggcgccggcctcgggcttaaataggagctccgggctctggctgggacccgaccgctgccggccgcgctcccgctgctcctgccgggtgatggaaaaccccagcccggccgccgccctgggcaaggccctctgcgctctcctcctggccactctcggcgccgccggccagcctcttgggggagagtccatctgttccgccagagccccggccaaatacagcatcaccttcacgggcaagtggagccagacggccttccccaagcagtaccccctgttccgcccccctgcgcagtggtcttcgctgctgggggccgcgcatagctccgactacagcatgtggaggaagaaccagtacgtcagtaacgggctgcgcgactttgcggagcgcggcgaggcctgggcgctgatgaaggagatcgaggcggcgggggaggcgctgcagagcgtgcacgaggtgttttcggcgcccgccgtccccagcggcaccggcagctttctacagcaggggtgtccgccctctcccggggttcccacggggttcccaggggcctcttactctgccacgatgtgggagttccaccaccacagggacttgagcggcagctccggctcttacgtagaaacgcgcaactccagtccctaggttgtgtccgaggttgctatggtgccatcccatcttgccgctcactctgcgactgtgcggagaaacgcaagtgcccccgaagggtgggcgtggcctctgatgaatgcacacgttggtgggaggtggcttccgtttgtacgaagcgcctcttcacgcgagcgttcacctcggtctcccctttgcttggtccagttccagaaacgccgctggactgcgaggtctccctgtggtcgtcctggggactgccgcgccgaccatctctgcactgaagggccctctggtggccggcacgggcattgggaaacagcctcctcctttcccaaccttgcttcttaggggcccccgtgtcccgtctgctctcagcctcctcctcctgcaggataaagtcatccccaaggctccagctactctaaattatgtctccttataagttattgctgctccaggagattgtccttcatcgtccaggggcctggctcccacgtggttgcagatacctcagacctggtgctctaggctgtgctgagcccactctcccgagggcgcatccaagcgggggccacttgagaagtgaataaatggggcggtttcggaagcgtcagtgtttccatgttatggatctctctgcgtttgaataaagactatctctgttgctcaaaaa

SEQ ID NO: 10 - DNA, 4282 bp, Homo sapien
gggagggataggacggggagacaaagaaaggggtgcggcagcactgccaggggaagagggtgatccgacccggggaaggtcgctgggcagggcgagttgggaaagcggcagcccccgccgcccccgcagccccttctcctcctttctcccacgtcctatctgcctctcgctggaggccaggccgtgcagcatcgaagacaggaggaactggagcctcattggccggcccggggcgccggcctcgggcttaaataggagctccgggctctggctgggacccgaccgctgccggccgcgctcccgctgctcctgccgggtgatggaaaaccccagcccggccgccgccctgggcaaggccctctgcgctctcctcctggccactctcggcgccgccggccagcctcttgggggagagtccatctgttccgccagagccccggccaaatacagcatcaccttcacgggcaagtggagccagacggccttccccaagcagtaccccctgttccgcccccctgcgcagtggtcttcgctgctgggggccgcgcatagctccgactacagcatgtggaggaagaaccagtacgtcagtaacgggctgcgcgactttgcggagcgcggcgaggcctgggcgctgatgaaggagatcgaggcggcgggggaggcgctgcagagcgtgcacgaggtgttttcggcgcccgccgtccccagcggcaccgggcagacgtcggcggagctggaggtgcagcgcaggcactcgctggtctcgtttgtggtgcgcatcgtgcccagccccgactggttcgtgggcgtggacagcctggacctgtgcgacggggaccgttggcgggaacaggcggcgctggacctgtacccctacgacgccgggacggacagcggcttcaccttctcctcccccaacttcgccaccatcccgcaggacacggtgaccgagataacgtcctcctctcccagccacccggccaactccttctactacccgcggctgaaggccctgcctcccatcgccagggtgacactgctgcggctgcgacagagccccagggccttcatccctcccgccccagtcctgcccagcagggacaatgagattgtagacagcgcctcaggtaacggacatacaggtcacatgggacacacagcagccccgaaccctgccacagggcgaccaccaaacccgaacctaaggctctgagaaattccaagtagggattcgtagtgcgtactgcaagatggtgcctagaagatttaggattctgttgattcacacactgaagatgtgactcttgcacattatttgcagttgaaagcatcttacagggccacagcccagaggaaagaatgaaaggaggctccagacagtacctgagagactctgtcctgtcagacacgcacccacaggtgacctgtgtgtcacagctgacaaggaagcttgctaggatggccctgtgtggccaccgggtgacagctatgctgcagggcacctgtgggggtctcgggacccagccaccacacagctcggggctctgctcacaggcgccttggcctggggcggggcaggtgctgatgagcattctcctagctcttccaggcacctgctggacagggcaggctgggaacgctggggccgagtggcagttccctccctactcagctgggtggcagccactggcctcacggagcgcctgtggtctggagcgcattgctgggtcgtgggtcagggcctgttggctctgggtctctgggtctcacctgatatgggtgtgggacagtcagtgtaggccccagacaacagcggacttcagactttcccgaggaggaactggagcccaccaacctggccatgggccccgtcgtcctccaccctccatgttgctggctggagttgaggcaggtacggggccgccccacacctgccccccaagccatgtggtagggacagatgtcgtcttgaggagcagcagtaattacaagcttactgtcagccgtccctggaagcaagggccaggtcaggtcagacaggaggccgcctggctggcgggaaccactccccagacagagactgtgcccagtcctgggtccctcctcatttgggatgaactgggcctccctgtgccagcctcggtgctgcccctgcccagtgcaggcttgggctcctcactcatttgtccacgcggatgccccattccaagcagatgtccccgagccacttacccaacaggcagacgtgccagcactgttcgtggtgtgcaactggtctggcgggaagagcccctcgtgggcagagggtccagagaggtgcggtttgccccacatttgggggcactgggccacagtgggcaggggagcacgtggccagtgccctgggctaggagagggataaagtcagctgtggccaagcagaagcagtattgcaggggaagggtggggagagactgtgctatgagctctgagcaggaggcaggacatggagagaagggtgggagacggacagagccagctgtgccagccgagggaccagagtgggcagtggggacggagcacagaccaccgcccacaagggtctctcctgtgacttctggcttcccgagggcagaggctgggatgggcatgtggcggctggcacccaggaggctccgccaggtccacgccaagccagcctggctcagctctggcttcctgctcacacgctggatgcctgtccccaggcctcctgacagggctctgcagcattggagaggcttgtggtggggccctcgctgtagaacaggcactgccagtgctcactgactcctcattgcagccagggcaggggcgctcccaccacctcggtttcagtcaggaagctggggggtgctgggatctgccagcagctctgtgtgctccccaggtgggctgcccggggccctggctctctggcttctacaccagtgcccctgcgaagcctcagcgcccaaggtctttgcaagccctgttcctgcatctctggagagggctgctccaggtgtgggcctggccagggcttccagaccagtccaggcactgcacctgcacattgacccccttctccactctctctcatccttcagtagccacaaagctggcagcagggtactcgcagatttgtgaggagagccgagcccttgctgactgtcctcccgtgcacggcagagtgaggcggggctcctggcctccttaggggctgcccgctctgggccacacagccagagaaacactgtccatctggctggcttggctctgccacgatgtgggagttccaccaccacagggacttgagcggcagctccggctcttacgtagaaacgcgcaactccagtccctaggttgtgtccgaggttgctatggtgccatcccatcttgccgctcactctgcgactgtgcggagaaacgcaagtgcccccgaagggtgggcgtggcctctgatgaatgcacacgttggtgggaggtggcttccgtttgtacgaagcgcctcttcacgcgagcgttcacctcggtctcccctttgcttggtccagttccagaaacgccgctggactgcgaggtctccctgtggtcgtcctggggactgtgcggaggccactgtgggaggctcgggaccaagagcaggactcgctacgtccgggtccagcccgccaacaacgggagcccctgccccgagctcgaagaagaggctgagtgcgtccctgataactgcgtctaagaccagagccccgcagcccctggggccccccggagccatggggtgtcgggggctcctgtgcaggctcatgctgcaggcggccgagggcacagggggtttcgcgctgctcctgaccgcggtgaggccgcgccgaccatctctgcactgaagggccctctggtggccggcacgggcattgggaaacagcctcctcctttcccaaccttgcttcttaggggcccccgtgtcccgtctgctctcagcctcctcctcctgcaggataaagtcatccccaaggctccagctactctaaattatgtctccttataagttattgctgctccaggagattgtccttcatcgtccaggggcctggctcccacgtggttgcagatacctcagacctggtgctctaggctgtgctgagcccactctcccgagggcgcatccaagcgggggccacttgagaagtgaataaatggggcggtttcggaagcgtcagtgtttccatgttatggatctctctgcgtttgaataaagactatctctgttgctcaaaaa

SEQ ID NO: 11 - DNA, 1082 bp, Homo sapien
aacttrgctagtacgaggctggtttaaatcggccgaggggtaccgggcggctgcggggctggctcgacccagcttgaggtctcggcgtccgcgtcctgcggtgccctgggatccgccgacatgaatcccatcgtagtggtccacggcggcggagccggtcccatctccaaggatcggaaggagcgagtgcaccagggcatggtcagagccgccaccgtgggctacggcatcctccgggagggcgggagcgccgtggatgccgtagagggagctgtcgtcgccctggaagacgatcccgagttcaacgcaggttgtgggtctgtcttgaacacaaatggtgaggttgaaatggatgctagtatcatggatggaaaagacctgtctgcaggagcagtgtccgcagtccagtgtatagcaaatcccattaaacttgctcggcttgtcatggaaaagacacctcattgctttctgactgaccaaggcgcagcgcagtttgcagcagctatgggggttccagagattcctggagaaaaactggtgacagagagaaacaaaaagcgcctggaaaaagagaagcatgaaaaaggtgctcagaaaacagattgtcaaaaaaacttgggaaccgtgggtgctgttgccttggactgcaaagggaatgtagcctacgcaacctccacaggcggtatcgttaataaaatggtcggccgcgttggggactcaccgtgtctaggagctggaggttatgccgacaatgacatcggagccgtctcaaccacagggcatggggaaagcatcctgaaggtgaacctggctagactcacccctgtccagtgctttgagattcttcccacctccccatcctcaccagccggatcgggcgctgtgcagtgtggtcagcatggtgaagaaagtcatttcctcggtgggcagtattcctctttatctctcattacactggaaatgttatttctgctgtatcatccgtgctcaacgttttagtctgtcaggctcaccttctctctggaaagaatttgcttaacttgacattccatgtgccgctaataaaatatattttgaaagaa

SEQ ID NO: 12 - DNA, 1720 bp, Homo sapien
gtaagcgcatggagaagtgataggaaaccctttcctgttggctacagatgttgctttcaggccgttaacaccttgttttgactctccgccttcccttaggtctggaatgggagagcattgagtactgttatcttccacatctcaggagaagggggcagtagagagacattgagcctggatgtgggagggaagacccctctgctcaggctgatgctagggcgctgtctcagggcaaggaggtgaggaccctccttttaagcattcaggcgttcatttaccaaaaatccttgctagctcactttggcatttcaaatggcaagtgattttcccatgagattcctttcagtaatgtgtgttgtttctcaacccttccttgttttcaggaaagacggtagaagaggctgcggacctatcgttgggttatatgaagtcaagggttaaaggtttaggtggcctcatcgtggttagcaaaacaggagactgggtggcaaagtggacctccacctccatgccctgggcagccgccaaggacggcaagctgcacttcggaattgatcctgacgatactactatcaccgaccttccctaagccgctggaagattgtattccagatgctagcttagaggtcaagtacagtctcctcatgagacatagcctaatcaattagatctagaattggaaaaattgtcccgtctgtcacttgttttgttgccttaataagcatctgaatgtttggttgtggggcgggttctgaagcaatgagagaaatgcccgtattaggaggattacttgagccctggaggtcaaagctgaggtgagccatgattactccactgcactccagcctgggcaacagagccaggccctgtatcaaaaaaaaaagaaaagggaaaaaagaaagaaagcagcagcatgatcctgacatgacagatgtgggagacccacagcctgcagacactgtgggctggaaggtgggaagggaggggccggtggaggtggagctgtttgaaagtgacacagcagcagtagaagcagtggtgggcgaagcccaggtgaccctcagaacgttgcacaagaacatcagggaaaagaaccagaatcctttaaggaaaatgttcttcatgtatgagagactaaagtgatttttctaagaaagttcagcccttctctgacttacctggacatttctagatacttccaaaggaccctctgggaatccatagcttcctaatctggagatgggaggtcataagggagacgctgtggggttccttgaagtttcttgggttcacagaggagccccctcacttggtgttctcccgtgagccagcctccacctgccaaagacactctggtcctcgtatagtgagtaatggggctcagggcctctccaacaacagagaggagctgatgctgtagggctgaccccgtgacttcctgagtcctcaccctgtccagtgctttgagattcttcccacctccccatcctcaccagccggatcgggcgctgtgcagtgtggtcagcatggtgaagaaagtcatttccttggtggacagtattcctctttatctctcattacactggaaatgttatttctgctgtatcatccgtgctcaacgttttagtctgtcaggctcaccttctctctggaaagaatttgcttaacttgacattccatgtgccgctaataaaatatattttgaaagaataagggtgtg

SEQ ID NO: 13 - DNA, 588 bp, Homo sapien
gagtccagcacgggaggcgtggtcttgtagttgttctccggctgcccattgctctcccactccacggcgatgtcgctgggatagaagcctttgaccaggcaggtcaggctgacctggttcttggtcagctcatcccgggatgggggcagggtgtacacctgtggttctcggggctgccctttggctttggagatggttttctcgatgggggctgggagggctttgttggagaccttgcacttgtactccttgccattcagccagtcctggtgcaggacggtgaggacgctgaccacacggtacgtgctgttgtactgctcctcccgcggctttgtcttggcattatgcacctccacgccgtccacgtaccagttgaacttgacctcagggtcttcgtggctcacgtccaccaccacgcacatgtacactgcacgttgtacgacgacgcaccgaggccatacctggcattcctgcggtacgactatagagatctcctccccagcctccggtcctggcctcgtcgatacctgtgtacagaagtgagccaccatccatgccgctaacagtcggtaccgagctcgattgatc

SEQ ID NO: 14 - DNA, 4146 bp, Homo sapien
cgcgtgcctttcaggcgatgagaatgatttatttgtttgtgatgcatgtttgctgaaagattaataaatcatttctgtgcctttagcaaacttcctgtgttgctcttaaaaagggatcatccaccttcccggaccacaaggttaaggtaaccccgctaggtaaccctgataggcctgctgcggggcagaccgacagagagagagagagtgagggcgagggtgaggtaagcaacgccccgggaaccccggggtccctggctcacatctcctcgccagctcaggcgccttctgggaaaatgaatccttgcatttttctgttctctaatatggcttttgaggtcttaaatttgaggagccggaatcatgccttcctcctaatctgcagggcctctttggagctgcccccgccagcagtgaagggtgcttgtcggccagggcgcctctccccgggcgcctggctggaggtggctggagctgggacgggcagggccctggctggggtggtggttggcagctcagctctcctcccttggctgcccttgctgaacccacccctgacctttgtgggcagctgcagtgtcaggcgggagctcggggctcttgctccaagactcttgagctcccaggaagacctgccacaccggcatcagtggctgctgctgtggccacgtgaggtggggctgtgaggggaggcggctgctgtggatgatgccaggaccctgggggcagagcctctgagaaggtgggctccctggctgcacagtgtcaggcagaagcccctggctgcctgctgaaagccccaaggtcaggggctgcccagctccccgcgctgcggtctgtggtggccccgtgcatgcaccgggtggctggcccgctgagcttccccggcaccaggtgccctggacctcgaggtcctgagcctgacccagggctggtctgaccgactctctgcttctggctcctgggcacttcttctcagctcagggcgtgctctgtcaaaacccaagtcctttcttggctctgtgtcaggcggggtgttcagcaggggtcacctggctcttctgtctttgcagggccccctgctgcgctggctcaaggtgaacttcagtgaagccttcattgcctggatccacatcaaggccctgagagtgtttgtggagtccgtgctcaggtatggactaccagtgaacttccaggcagtgctcctgcagccgcataagaagtcatccaccaagcgtttaagagaggttctaaactctgtcttccgacatctggatgaagtagccgctacaagtatactggatgcatctgtggagatcccgggactgcaactcaataaccaagactattttccttatgtctacttccatattgaccttagtcttcttgactagaaaggccagctggcacctctgtctcatgttcgtgcagattattacagacacctctttcctttagccagagaatggttcaaatgtcttacagaactaagatctttttcagagaaattgctcacaaaagttagtgacagttgtatttatttttttaagttacaataaaatgctctcaagtcctttgaatgttccaacaaattcaaaacttcattttctgaatgttttacataaatgcgaactacctgttcgcattggtaacctgctgctgtatttcatgtcttaacggctattttgaggttcattaacaacatagaaagccttgaactgtataaccagctagattccttaataattagtcactagagacagcccaaagacaaatattgggcaggaaatcagttctcactgagcccggtttccatgtaaaatctctgttgtggtgggcataggtggcaccatctaaagaaaagaggtcttgttttttgtttaaaaaagtttgtggggaggaaagacatctgtgtatcacttcaaaatattgatttactgctaaacatcactctgaatttatgatgtggatactaacttcatacatttatcggcattgtccaaaatattttattctttaatggaaaaagccattaatattcaaatgaagggatcacattaaaaaaaaacccatacataagaaacagcctccaagaacattcaagcagcagtcagagagaaaaatgtttcgacagccaagttttcttcaaaatattatgtgacagaatacgactcaattcaccggctacaacaattcatagaatttttcaatgttttcttgagatgcaaaagttcactgttgcagtgttttcaaatgaccaatcaagtactacttcttggttaaaaggccactggtagagtcatctgagtgtagagaatgtcccttcactgctggaaaaatccactggctcccaagaaaagaaaatggtctgaagcctctgttgtggctctcacaactcatctttccctaagtcatcaagctccacatcactgaggtcaatgtcatcctccacgggaagctgggagacgacagaaagccactgttagatctgcagaaggggacaccctggaaggtcaacatctcattttacggaagagcgactctctggagctactcctgctacaatccaggttctcctcagtctgactcctaccctgaccttcgtacctatgattatacggatggaaaagctcagaactcaggtgaaacatttcaacatcacatcactcaccattttaacactggaagccacttgaacgtgtccttttgaggagggtgggacacaacagtacagaaataagtgctaatttcaaagctatcattttctatttttctaagataaagtaaatgaattccaggttaaatgttcactttaaggtaataatcaggaaagcaaccttactactgaaatgtatcttggctgtcaagagtatcaaatgccatgcagcacttaaacttgtgataaggaagatgaagggtcttcagagaagaacctcttaaaaggcccacgggtgcaccagggctgaggtctgatgggaaggacttgactccaggtgcagagatgcacaggctcaagagagtaaaccaggactgctgcccgcacagcttccctcccgggcactcacctcgccatccctgccgtcccaaggctctctctcaacgatggtagggaaagccccgcctcctacaggtgccgtggagccacgcccaaaagagagctcccttagggaaaaatgaccaaaacacacacacacatttacaatggactgctggtgcagaagaataaacaactttaaaaataacagtctgcctactttgtttatgcagaggcatttcttctctcttgctgcactacattcctcagaaacaccttgaggacattatctttttaatcacggacaacattacaaccagattcaacattcccaactaagccccctgcatcagataaagtcagttgctatcagtaagcttttaaaaatagcagagcatttgctgaaatacaaattaaatacataaataattatcaaagttgatctagaacatgggctgcctgcgagctttctaagactgctgtgaacctgtacagagggagcatatcagaagtgaggcgactggttccagtgcgctggcagagagcggggtgcgtatgtgcataaacatcagtacttgaaacataccagacctggtgtaatctggctgttgggaaaccagagccagaaatactgtgggcacaaatatttagagttcaccaaacaactcatagaataatagagctagactaacaatctatggcaccaatgggctagaataagcaaacctattattagaaaaaaaaattacaggagatatattcacattctgacttcatgatttaataaatactactctatgacaatcacaaacttaagcagtccacaaacttctttttctttgagaccaagtcacactcttttgcccaggctggagtgcagtggtgtgatctcagctcactgcaacgtccacctcctgggtgtgcctcagcctccctagtagctaggactgcaggcctacaacaccacacctggcctattttttgtatttttagtagacataaggtctcaccgtggtggccagcctggtctcgaactcctggcctcaagtgatccgcctgcctcagactcccaaagtgttggaattacaggcgtgagccaccgcacccagccc

SEQ ID NO: 15 - DNA, 2063 bp, Homo sapien
aatggggtggtactggtggttggtaacagatgtagaggggggtcatctcctgctccctcagtccactgttgtggatgtaggagaggcatttttcgaattaacccagtcagacmaaaatagaaaagagaattttaaaaaatgaacaaatccttttaaaaaaatcatgtgagtttttcttaaagcacaattctaaagttaaacacaaaaagaagcactataaaccaagttcacacaagctgaaggtcatttccaaatccatgggaaccagcacaggagctacagcaaatcatggcacttctgcagtagcaattactagccatgattacctaggacaagaaactttgacagaaatccaaacctcaccagaaacatcaatgagagaggtgaaagcggacggagctagcacccccaggttaagagaacaggactgtggtgaacctgcctcgccagcagcatccatctccagactctctggggaacaggtcgacgggaagggccaggcaggcagtgtatctgaaagtgcgcggagtgaaggaaggattagtccaaagagtgatattactgacactggcctggcacagagcaacaatttgcaggtccccagttcttcagaaccaagcagcctcaaaggttccacatctctgcttgttcacccggtttcaggagtgagaaaagagcagggaggtggttgtcattcagatacttgaagaacattttctctcgttactcagaagcaaatttgtgttacactggaagtgacctatgcactgttttgtaagaatcactgttacgttcttcttttgcacttaaagttgcattgcctactgttatactggaaaaaatagagttcaagaataatatgactcatttcacacaaaggttaatgacaacaatatacctgaaaacagaaatgtgcaggttaataatatttttttaatagtgtgggaggacagagttagaggaatcttccttttctatttatgaagattctactcttggtaagagtattttaagatgtactatgctattttacttttttgatataaaatcaagatatttctttgctgaagtatttaaatcttatccttgtatctttttatacatatttgaaaataagcttatatgtatttgaacttttttgaaatcctattcaagtatttttatcatgctattgtgatattttagcactttggtagcttttacactgaatttctaagaaaattgtaaaatagtcttcttttatactgtaaaaaaagatataccaaaaagtcttataataggaatttaactttaaaaacccacttattgataccttaccatctaaaatgtgtgatttttatagtctcgttttaggaatttcacagatctaaattatgtaactgaaataaggtgcttactcaaagagtgtccactattgattgtattatgctgctcactgatccttctgcatatttaaaataaaatgtcctaaagggttagtagacaaaatgttagtcttttgtatattaggccaagtgcaattgacttcccttttttaatgtttcatgaccacccattgattgtattataaccacttacagttgcttatattttttgttttaacttttgttttttaacatttagaatattacattttgtattatacagtacctttctcagacattttgtagaattcatttcggcagctcactaggattttgctgaacattaaaaagtgtgatagcgatattagtgccaatcaaatggaaaaaaggtagtcttaataaacaagacacaacgtttttatacaacatactttaaaatattaaggagttttcttaattttgtttcctattaagtattattctttgggcaagattttctgatgcttttgattttctctcaatttagcatttgcttttggtttttttctctatttagcattctgttaaggcacaaaaactatgtactgtatgggaaatgttgtaaatattaccttttccacattttaaacagacaactttgaatacaaaaactttgttttgtgtgatcttttcattaataaaattatctttgtataagaa

SEQ ID NO: 16 - DNA, 634 bp, Homo sapien
actctaaggatcccgacgctctctgtgggggatgagctgtcacgggttgggccggactgagagcaacagaaccctgctgctgccctggccccaccttgtccagcacaggaggcccaagcctgggttgtctcccctctcacccacccatctctccctcccaaggaaaaagaagtgtgactactggatcaggacttttgttccaggttgccagcccggcgagttcacgctgggcaacattaagagttaccctggattaacgagttacctcgtccgagtggtgagcaccaactacaaccagcatgctatggtgttcttcaagaaagtttctcaaaacagggagtacttcaagatcaccctctacgggagaaccaaggagctgacttcggaactaaaggagaacttcatccgcttctccaaatctctgggcctccctgaaaaccacatcgtcttccctgtcccaatcgaccagtgtatcgacggctgagtgcacaggtgccgccagctgccgcaccagcccgaacaccattgagggagctgggagaccctccccacagtgccacccatgcagctgctccccaggccaccccgctgatggagccccaccttgtctgctaaataaacatgtgccctcagg

SEQ ID NO: 17 - DNA, 1229 bp, Homo sapien
accacagctggggctaggaatggttcagaaggtttaaggccggaaagggaaatgaaggggcccggcgctaaccctctaaggacctgttttgcttctgtttaaaccaaatgggcagtctgtcattacacacaccctgggtcttcatatgtggccgccaggtaggagcatcacagtcaagctacgggagaaaacagtttccaggaaactggaaatgaacggcccgagtgctttccaggggctcatctgtgggaagtataatggaatgtgcttacaagggccagcaggagtgcctggtcgagacgggagccctggggccaatggcattccgggtacacctgggatcccaggtcgggatggattcaaaggagaaaagggggaatgtctgagggaaagctttgaggagtcctggacacccaactacaagcagtgttcatggagttcattgaattatggcatagatcttgggaaaattgcggagtgtacatttacaaagatgcgttcaaatagtgctctaagagttttgttcagtggctcacttcggctaaaatgcagaaatgcatgctgtcagcgttggtatttcacattcaatggagctgaatgttcaggacctcttcccattgaagctataatttatttggaccaaggaagccctgaaatgaattcaacaattaatattcatcgcacttcttctgtggaaggactttgtgaaggaattggtgctggattagtggatgttgctatctgggttggcacttgttcagattacccaaaaggagatgcttctactggatggaattcagtttctcgcatcattattgaagaactaccaaaataaatgctttaattttcatttgctacctctttttttattatgccttggaatggttcacttaaatgacattttaaataagtttatgtatacatctgaatgaaaagcaaagctaaatatgtttacagaccaaagtgtgatttcacactgtttttaaatctagcattattcattttgcttcaatcaaaagtggtttcaatattttttttagttggttagaatactttcttcatagtcacattctctcaacctataatttggaatattgttgtggtcttttgttttttctcttagtatagcatttttaaaaaaatataaaagctaccaatctttgtacaatttgtaaatgttaagaattttttttatatctgttaaataaaaattatttccaacaacctta

SEQ ID NO: 18 - DNA, 1005 bp, Homo sapien
  misc_feature (896)..(896): n=a, c, g or t
ccagccccgagagacttttcttgacttccaccagttgctccggcgggtgagagtggagaggcccctccttcatcccccaggctccctcccttcctggagctgcagcctcagcatcctccgcccagacacccctacgcgtattcagggcgttgtggtcccgcccttgttaggctgtccacctcatacatcggtgcctggacaggatatataagcagagaatgccatccgtggcactacacacgcgactcccacaaggttgcagccggagccgcccagctcaccgagagcctagttccggccagggatcgccccggcaaccacgagcccagccaattaagcgccccgcgactgctaccadagaccatggtcggcagaagagcactgatcgtactggctcactcagagaggacgtccttcaactatgccatgaaggaggctgctgcagcggctttgmagaagaaaggmtgggaggtggtggagtcggacctctatgccatgaacttcaatcccatcatttccagaaaggacatcacaggtaactgaaggaccctgcgaactttcagtatcctgccgagtctgttctggcttataaagaaggccatctgagcccagatattgtggctgaacttggagtccctgccattctgaaaggctggtttgagcgagtgttcataggagagtttgcttacacttacgctgccatgtatgacaaaggacccttccggagtaagaaggcagtgctttccatcaccactggtggcagtggctccatgtactctctgcaagggatccaccgcgacatgaatgtcattctctggccaattcagagtggcattctgcatttctggggctttcaagtcttagaaccctcactgacatatagcattgggacactncagcagacgcccgaattaaatcctgtaaggatgggagaaacgcctgacgatatttgcatgagacaccatgattttgctccaagagctctttgcctaaacttcagcaaga

SEQ ID NO: 19 - DNA, 2292 bp, Homo sapien
ccctttatatgctctaggccctgtacaaactgtacggtaactggccccgggattttattgcgcctcccgattttatacgggttgcagtactccgggctcggcatggctctcctgggtgctcggtctggtgagctgtaccttctttctggcagtgaatggtctgtattcctctagtgatgatgtgatcgaattaactccatcgaatttcaaccgagaagttattcagagtgatagtttgtggcttgtagaattctatgctccatggtgtggtcactgtcaaagattaacaccagaatggaagaaagcagcaactgcattaaaagatgttgtcaaagttggtgcagttgatgcagataagcatcattccctaggaggtcagtatggtgttcagggatttcctaccattaagatttttggatccaacaaaaacagaccagaagattaccaaggtggcagaactggtgaagccattgtagatgctgcgctgagtgctctgcgccagctcgtgaaggatcgcctcgggggacggagcggaggatacagttctggaaaacaaggcagaagtgatagttcaagtaagaaggatgtgattgagctgacagacgacagctttgataagaatgttctggacagtgaagatgtttggatggttgagttctatgctccttggtgtggacactgcaaaaacctagagccagagtgggctgccgcagcttcagaagtaaaagagcagacgaaaggaaaagtgaaactggcagctgtggatgctacagtcaatcaggttctggcctcccgatacgggattagaggatttcctacaatcaagatatttcagaaaggcgagtctcctgtggattatgacggtgggcggacaagatccgacatcgtgtcccgggcccttgatttgttttctgataacgccccacctcctgagctgcttgagattatcaacgaggacattgccaagaggacgtgtgaggagcaccagctctgtgttgtggctgtgctgccccatatccttgatactggagctgcaggcagaaattcttatctggaagttcttctgaagttggcagacaaatacaaaaagaaaatgtgggggtggctgtggacagaagctggagcccagtctgaacttgagaccgcgttggggattggagggtttgggtaccccgccatggccgccatcaatgcacgcaagatgaaatttgctctgctaaaaggctccttcagtgagcaaggcatcaacgagtttctcagggagctctcttttgggcgtggctccacggcacctgtaggaggcggggctttccctaccatcgttgagagagagccttgggacggcagggatggcgagcttcccgtggaggatgacattgacctcagtgatgtggagcttgatgacttagggaaagatgagttgtgagagccacaacagaggcttcagaccattttcttttcttgggagccagtggatttttccagcagtgaagggacattctctacactcagatgactctaccagtggccttttaaccaagaagtagtacttgattggtcatttgaaaacactgcaacagtgaacttttgcatctcaagaaaacattgaaaaattctatgaattgttgtagccggtgaattgagtcgtattctgtcacataatattttgaagaaaacttggctgtcgaaacatttttctctctgactgctgcttgaatgttcttggaggctgtttcttatgtatgggttttttttaatgtgatcccttcatttgaatattaatggctttttccattaaagaataaaatattttggacaatgccgataaatgtatgaagttagtatccacatcataaattcagagtgatgtttagcagtaaatcaatattttgaagtgatacacagatgtctttcctccccacaaacttttttaaacaaaaaacaagacctcttttctttagatggtgccacctatgcccaccacaacagagattttacatggaaaccgggctcagtgagaactgatttcctgcccaatatttgtctttgggctgtctctagtgactaattattaaggaatctagctggttatacagttcaaggctttctatgttgttaatgaacctcaaaatagccgttaagacatgaaatacagcagcaggttaccaatgcgaacaggtagttcgcatttatgtaaaacattcagaaaatgaagttttgaatttgttggaacattcaaaggacttgagagcattttattgtaacttaaaaaaataaatacaactgtcacta

SEQ ID NO: 20 - DNA, 825 bp, Homo sapien
tgagggctgcatcaagatcttgtcattccacatcggggtttcctttgaggatgtggctgtacccctctcccaggaggagtgggactgtctgatccctgctcagaggggcctctacaaggatgtgatgatggggacctatgggaacctactctcattagtaggtgaatggttaagcaaactgtggtacatccataccatgggatacgactcaacaatcaaaaggaactgcccagacttcaccacgatgcaatatatgcatgtaagaaatctgcacttataccccctaaatatataaaacatttttaaaagaaaaaaaggaagaagatacatgcaacaacttggatggatttcaagggaattatgctgaatgaaaaaaagtcaacctcataagattacattctatatgattccattcatatgacattcttgaaatgacaaaattacaaagatggaagacagaacagtggtagccacaggttggggtgaggggataagaaagggatgtggctgtggctgtaaaagcgcagacaagggatccatgtgatagaactgttctgtctcttgtgatggtggtcacatgaatctacacatgataatactgcatataattgtctaaaatgacattttcttcaagagttatctacagtttaaagctcacttttatgaagtgtcacatccatcaccattttaagagacataaaatcatgaaaagatatcaccagaagctacgtaaacatttcagctaagggtaaagagaaagttaagagtgttttcacaaggaaattgaaagaaggcaatccgaatgaagtcaacttggtcacacaa

SEQ ID NO: 21 - DNA, 308 bp, Homo sapien
gcggccgctccaacatcagaatggtgcagcacctacgaggtgcggctgacgcagaccgtggcccacctgaagcagcaagtgagcgggctggagggtgtgcaggacgacctgttctggctgaccttcgaggggaagcccctggaggaccagctcccgctgggggagtacggcctcaagcccctgagcaccgtgttcatgaatctgcgcctgcggggaggcggcacagagcctggcgggcggagctaagggcctccaccagcatccgagcaggatcaagggccggaaataaaggctgttgtaaagagaaa

SEQ ID NO: 22 - DNA, 4633 bp, Homo sapien
gccacttactagctgtgtgacttcgggaaacttatttaacttcttgtagcatgagtcttaggcagggctccccagaaacagaccctaagacaactactaatggagggagaactctaaggagaatcctataggagatggagggaagcaggatagagctggggaagaagctgggccagaatacagctgcttcagaactctagtctcagcctgatcccatggagaactcaagaagtcatgagttgcatcacagaggctgttgcacccagaggtgggggtggggggtgtctgttagatcaccacatcagttagtcattggtctcagcttgctcccctcctccctccaccccctggctcccattccctgacaaggcagctctgctcagccagtgacaatctgatggagaggagattaagcatgatccattagcagtcacccctgcagcatttgagggatgggtgggcagacgggccctggcttatgatggttcagcttatgatttttctactttacagtggtgtgaaagcagtatgcatttagtagacaccacgcttcaagtacccatgcaaccattccgtttttcattttcagtattgaataaattacatttattgtacagtattcaatatgttatgtttatttactgtgtggcactcaacactttattatataataagctttgtattaggtgaactgtagactaataaaagtgtcctgagaatgtaggctaggctaagctatgatttcagtaggttaggtgtattaaatgcattttcaacttaaggtagtttcaacttacaacgggtttattgggacgtcactccattgtatgtggaggagcatctgtacctccataaagggaatctgggcagaggaccaacagtatttgctacactcagttacctcctcttcaaaatgataacaaatatagctctcttacaaggtcaccgtgagtattaaatgggataattaaagcacacagggcagatggtaagtatctacatattgtagttcctttctctctcatatttaattttcttgtcttaattgcttctagccgaagaccgcataatttaacatgatttcgtttctttactaggatgaagtggcccaccatcaaaccattccagtacaaattggaaaagagatagaaaaaataacacgcaaaaaagtgtatgatttaatatttttactttgaatccctgccagtccaagttatgtgtgcacactagaacaagagtactaaccattggacacattaaattactatgataattttagaaatttctgctttgggccctgtctaggttgtttatatcaagttctttaaaagaaagtaatgcaccaaatttctatcattcatagtatttatggcttaattatgggtcaagattctgttgccaatttataaatcatatttttatggagaagttcaattgactttaacagagcggtgcatgggataaattatgcgaactggttagaatttcatagtctagaagtatatcagccaggcagcagcccaaagcccaaataatagtaactccccactttgccacccattcatgtgtataacactcctcagatattcagagtagattgggaggcagaggtcattgaggaaattctcagtgtttaaggaaccaaaaaagataaagattttaagtgaagatacaaaaattttggaaaaataatataattactctggtgactaatcttaaggggaaaaattaggcaggcactagtaactgttctaaaaactaagctcaccaacatcaaagttgagaaactcaggtcagtttcaggaggctggtcaggacgagggttgaatcacaggagatggtagcaaattgggatctgcacagaaagtagggaggctgggcaaattcctgccttccgtggcactcagtggagataccctccaagtcccacccatctgtggtctttacccactgctgagatcattgaatttatgactatctcttctgctgcatggttagaaagcaagaataggtaaagccagcatggcctcaaaataaggcaagtgtgtgtgtgtgtgtgtgtgtgtgtgtgtatcccctacagagaaatggaaaagaaaaaaattgtcttggaacaagaagtcaaaacgctaaatgactccctaaagaaagttgaaaacaaggttagtgctatagtggatgagaaggaaaatgtaataaaggaagttgaaggcaaacgagccttacttgaaatcaaagaacgagaacataaccaattggtcaagctattggaattagccagagagaatgaagcaacttcattaactgaaagagggatcttggatctcaatttacgcaacagtctcattgacaagcagaactaccatgatgaactttctcgtaagcaaagagagaaagaacgagattttcgaaatttaagaaagatggaactgctcttgaaagtgtcctgggatgcacttaggcaaactcaagcactgcatcaaaggcttctattagagatggaagctatccccaaagatgattctacattatctgagagaaggcgagagcttcacaaggaagttgaagtagctaagaggaatttggcccaacagaaaattatatcagaaatggagtctaagttagtagaacaacaacttgcagaagaaaacaagcttttaaaggagcaagaaaacatgaaagagctagtagtcaaccttctccgcatgactcaaatcaaaattgatgaaaaggaacaaaagtccaaggatttcctgaaagctcagcaaaaatacaccaacattgttaaagaaatgaaagcaaaggatcttgaaatcaggatacacaagaagaaaaaatgtgaaatttatcggagactgagagagtttgctaaactgtatgacaccattcgaaatgaaagaaacaaatttgttaacttactccacaaagctcatcagaaagtaaatgaaataaaagaaaggcataaaatgtcattaaatgaacttgaaattctgagaaatagtgccgttagtcaagaaagaaagctacaaaattccatgctgaaacacgccaacaatgttaccatcagagagagcatgcaaaacgatgtgcgcaaaattgtatcaaaacttcaggaaatgaaagaaaagaaggaagcccagttaaataacattgacagacttgccaacacgatcacaatgatcgaagaggagatggtgcagcttcgcaaaagatacgaaaaagctgttcagcatcgaaatgaaagcctctgcctctgaatttgaccatagtggcgttcagctgatagagcgggaagaagaaatatgcattttttatgaaaaaataaatatccaagagaagatgaaactaaatggagaaattgaaatacatctactggaagaaaagatccaattcctgaaaatgaagattgctgagaagcaaagacaaatttgtgtgacccagaaattactgccagccaagaggtccctggatgccgacctagctgtgctccaaattcagttttcacagtgtacagacagaattaaagacctggagaaacagttcgtaaagcctgatggtgagaatagagctcgcttccttccagggaaagatctgaccgaaaaagaaatgatccaaaaattagacaagctggaactacaactggccaagaaggaggagaagctgctggagaaggatttcatctatgagcaggtctccaggctcacagacaggctctgcagcaaaactcagggctgcaagcaggacacactgctcttagccaagaagatgaatggctatcaaagaaggatcaaaaatgcaactgagaaaatgatggctcttgttgctgagctgtccatgaaacaagccctaaccattgaactccaaaaggaagtcagggagaaagaagacttcatcttcacttgcaattccaggatagaaaaaggtctgccactcaataaggaaattgagaaagaatggttgaaagtccttcgagatgaagaaatgcacgccttggccatcgctgaaaagtctcaggagttcttggaagcagataatcgccagctgcccaatggtgtttacacaactgcagagcagcgtccgaatgcctacatcccagaagcagatgccactcttcctttgccaaaaccttatggtgctttggctccttttaaacccagtgaacctggagccaatatgaggcacataaggaaacctgttataaagccagttgaaatctgaatatgtgaacaaatccaggcctctcaaggaaaagacttcaaccaggcttccttgtacccacaggtgaaaaatgtgagcataatacttctaatattattgataagtaaggtaaccacaattagtcagcaacagagtacaacagggtttctatttacccaccaactactatacctttcatgacgttgaatgggacatagaactgtcctacatttatgtcaaagtatatatttgaatcgcttatattttctttttcactctttatattgagtacattccagaaatttgtagtaggcaaggtgctataaaaatgcactaaaaataaatctgttctcaatgaagtacggaaatggacacagtggtctttgtttattaaagaaaaaacaaatactgttcaatatacacactttaaaaagaa

SEQ ID NO: 23 - DNA, 972 bp, Homo sapien
tatggcgatgggccttaatcatgctcgagcggcgcagtgtgatggatgcggcgccgggcaggtctgatgtcatggtctctagcagcctgaatccgggtcgccagaggccacagggaccgaggccaggcttctaggagatggctccaggaaggcggccaagaatgtgagtgcaaagattggttcctgagagccccgagaagaaaattcatgacagtgtctgggctgccaaagaagcagtgcccctgtgatcatttcaagggcaatgtgaagaaaacaagacaccaaaggcaccacagaaagccaaacaagcattccagagcctgccagcaatttctcaaacaatgtcagctaagaagctttgctctgcctttgtaggagctctgagcgcccactcttccaattaaacattctcagccaagaagacagtgagcacacctaccagacactcttcttctcccacctcactctcccactgtacccacccctaaatcattccagtgctctcaaaaagcatgtttttcaagatcattttgtttgttgctctctctagtgtcttcttctctcgtcagtcttagcctgtgccctccccttacccaggcttaggcttaattacctgaaagattccaggaaactgtagcttcctagctagtgtcatttaaccttaaatgcaatcaggaaagtagcaaacagaagtcaataaatatttttaaatgtcacagatcaaaattgtttccttcaaatggggtctgccaattcacaaccagatgacccattttaccctattcactgcagactgaatccagattctacacatacttatccccaccaagaccctcactctgtctccattggcctacttgttcatctttcactcattcgacaaatctttctgaggtaagagcgaggtgggacaaaaaaaaaaaagcataccaatgaaccagacacggtcttattaaagataatataggttta

SEQ ID NO: 24 - DNA, 942 bp, Homo sapien
tatggcgatgggccttaatcatgctcgagcggcgcagtgtgatggatgcggcgccgggcaggtcgggtcgccagaggccacagggaccgaggccaggcttctaggagatggctccaggaaggcggccaagaatgtgagtgcaaagattggttcctgagagccccgagaagaaaattcatgacagtgtctgggctgccaaagaagcagtgcccctgtgatcatttcaagggcaatgtgaagaaaacaagacaccaaaggcaccacagaaagccaaacaagcattccagagcctgccagcaatttctcaaacaatgtcagctaagaagctttgctctgcctttgtaggagctctgagcgcccactcttccaattaaacattctcagccaagaagacagtgagcacacctaccagacactcttcttctcccacctcactctcccactgtacccacccctaaatcattccagtgctctcaaaaagcatgtttttcaagatcattttgtttgttgctctctctagtgtcttcttctctcgtcagtcttagcctgtgccctccccttacccaggcttaggcttaattacctgaaagattccaggaaactgtagcttcctagctagtgtcatttaaccttaaatgcaatcaggaaagtagcaaacagaagtcaataaatatttttaaatgtcacagatcaaaattgtttccttcaaatggggtctgccaattcacaaccagatgacccattttaccctattcactgcagactgaatccagattctacacatacttatccccaccaagaccctcactctgtctccattggcctacttgttcatctttcactcattcgacaaatctttctgaggtaagagcgaggtgggacaaaaaaaaaaaagcataccaatgaaccagacacggtcttattaaagataatataggttta

SEQ ID NO: 25 - DNA, 877 bp, Homo sapien
aatgctgtcgagcggcgcagtgtgatggatcggccgcccgggcaggtctccaggaaggcggcaagaatgtgagtgcaaagattggttcctgagagccccgagaagaaaattcatgacagtgtctgggctgccaaagaagcagtgcccctgtgatcatttcaagggcaatgtgaagaaaacaagacaccaaaggcaccacagaaagccaaacaagcattccagagcctgccagcaatttctcaaacaatgtcagctaagaagctttgctctgcctttgtaggagctctgagcgcccactcttccaattaaacattctcagccaagaagacagtgagcacacctaccagacactcttcttctcccacctcactctcccactgtacccacccctaaatcattccagtgctctcaaaaagcatgtttttcaagatcattttgtttgttgctctctctagtgtcttcttctctcgtcagtcttagcctgtgccctccccttacccaggcttaggcttaattacctgaaagattccaggaaactgtagcttcctagctagtgtcatttaaccttaaatgcaatcaggaaagtagcaaacagaagtcaataaatatttttaaatgtcacagatcaaaattgtttccttcaaatggggtctgccaattcacaaccagatgacccattttaccctattcactgcagactgaatccagattctacacatacttatccccaccaagaccctcactctgtctccattggcctacttgttcatctttcactcattcgacaaatctttctgaggtaagagcgaggtgggacaaaaaaaaaaaagcataccaatgaaccagacacggtcttattaaagataatataggttta

SEQ ID NO: 26 - DNA, 750 bp, Homo sapien
ccggaaccagaactggaatccgcccttaccgcttgctgccaaaacagtgggggctgaactgacctctcccctttgggagagaaaaactgtctgggagcttgacaaaggcatgcaggagagaacaggagcagccacagccaggagggagagccttccccaagcaaacaatccagagcagctgtgcaaacaacggtgcataaatgaggcctcctggaccatgaagcgagtcctgagctgcgtcccggagcccacggtggtcatggctgccagagcgctctgcatgctggggctggtcctggccttgctgtcctccagctctgctgaggagtacgtgggcctgtcccagcaagggctctggcagctgacagggctttgtctgggacagcctgcaaaccagtgtgccgtgccagccaaggacagggtggactgcggctacccccatgtcacccccaaggagtgcaacaaccggggctgctgctttgactccaggatccctggagtgccttggtgtttcaagcccctgcaggaagcagaatgcaccttctgaggcacctccagctgcccccggccgggggatgcgaggctcggagcacccttgcccggctgtgattgctgccaggcactgttcatctcagcttttctgtccctttgctcccggcaagcgcttctgctgaaagttcatatctggagcctgatgtcttaacgaataaaggtcccatgctccacccgaggacagttcttcgtgcctga

SEQ ID NO: 27 - DNA, 860 bp, Homo sapien
ccggaaccagaactggaatccgcccttaccgcttgctgccaaaacagtgggggctgaactgacctctcccctttgggagagaaaaactgtctgggagcttgacaaaggcatgcaggagagaacaggagcagccacagccaggagggagagccttccccaagcaaacaatccagagcagctgtgcaaacaacggtgcataaatgaggcctcctggaccatgaagcgagtcctgagctgcgtcccggagcccacggtggtcatggctgccagagcgctctgcatgctggggctggtcctggccttgctgtcctccagctctgctgaggagtacgtgggcctgtggaaagtgcatcttcctaagggcgagggtttcagcagtggttgaactcggcggggtggggcggacgggaggatgcaaacttgcaaagtgaagcaaacacactcaccgcagcccagcaagggctctggcagctgacagggctttgtctgggacagcctgcaaaccagtgtgccgtgccagccaaggacagggtggactgcggctacccccatgtcacccccaaggagtgcaacaaccggggctgctgctttgactccaggatccctggagtgccttggtgtttcaagcccctgcaggaagcagaatgcaccttctgaggcacctccagctgcccccggccgggggatgcgaggctcggagcacccttgcccggctgtgattgctgccaggcactgttcatctcagcttttctgtccctttgctcccggcaagcgcttctgctgaaagttcatatctggagcctgatgtcttaacgaataaaggtcccatgctccacccgaggacagttcttcgtgcctga

SEQ ID NO: 28 - DNA, 4559 bp, Homo sapien
  misc_feature (18)..(18): n=a, c, g or t
  misc_feature (108)..(108): n=a, c, g or t
aaacttcatcaaggtacntaaggttgtaaggttctcggggggtagcggcttgcacacctcttgaagggcttcarccgggcccctggctccttcaggctggctgccttnatccgcttatccaatgattggataacggatgaggggagtctgggtgccaggtgctttgcccgcatggcccatttcagtcacgctgcagtcctgtcaggaaaaaatcagtgttattctcattctacatatgagaaaactgaggcttgcagatataagggccaaaagttacacagctagtgagtgatggggctgagtttcagactccacagtctcttaaccaccaagcagcatgcccagagtagaggtgagaaggaaggagagagctgcggtccacatgagcatctggacctagcatggacaactcactcctccctggctctcgctttgttcttgttgcgggtgtggtggtggtgggactcaaagacggtaaagatagctttctctcctccctggggaatctgggggttgtttaaaaggcctgctcctcttttagaaggcaggagggccccaagggaagcagaaggtgacagaaggggaaagggtcctctgatcattgctcaccccacagagatcttgaaaggaggggtcttgatccagcggaacccccagctctgctaccaggacacgattttgtggaaggacatcttccacaagaacaaccagctggctctcacactgatagacaccaaccgctctcgggcctgccacccctgttctccgatgtgtaagggctcccgctgctggggagagagttctgaggattgtcagagcctgacgcgcactgtctgtgccggtggctgtgcccgctgcaaggggccactgcccactgactgctgccatgagcagtgtgctgccggctgcacgggccccaagcactctgactgcctggcctgcctccacttcaaccacagtggcatctgtgagctgcactgcccagccctggtcacctacaacacagacacgtttgagtccatgcccaatcccgagggccggtatacattcggcgccagctgtgtgactgcctgtccctacaactacctttctacggacgtgggatcctgcaccctcgtctgccccctgcacaaccaagaggtgacagcagaggatggaacacagcggtgtgagaagtgcagcaagccctgtgcccgagtgtgctatggtctgggcatggagcacttgcgagaggtgagggcagttaccagtgccaatatccaggagtttgctggctgcaagaagatctttgggagcctggcatttctgccggagagctttgatggggacccagcctccaacactgccccgctccagccagagcagctccaagtgtttgagactctggaagagatcacaggttacctatacatctcagcatggccggacagcctgcctgacctcagcgtcttccagaacctgcaagtaatccggggacgaattctgcacaatggcgcctactcgctgaccctgcaagggctgggcatcagctggctggggctgcgctcactgagggaactgggcagtggactggccctcatccaccataacacccacctctgcttcgtgcacacggtgccctgggaccagctctttcggaacccgcaccaagctctgctccacactgccaaccggccagaggacgagtgtgtgggcgagggcctggcctgccaccagctgtgcgcccgagggcactgctggggtccagggcccacccagtgtgtcaactgcagccagttccttcggggccaggagtgcgtggaggaatgccgagtactgcaggggctccccagggagtatgtgaatgccaggcactgtttgccgtgccaccctgagtgtcagccccagaatggctcagtgacctgttttggaccggaggctgaccagtgtgtggcctgtgcccactataaggaccctcccttctgcgtggcccgctgccccagcggtgtgaaacctgacctctcctacatgcccatctggaagtttccagatgaggagggcgcatgccagccttgccccatcaactgcacccactcctgtgtggacctggatgacaagggctgccccgccgagcagagagccagccctctgacgtccatcatctctgcggtggttggcattctgctggtcgtggtcttgggggtggtctttgggatcctcatcaagcgacggcagcagaagatccggaagtacacgatgcggagactgctgcaggaaacggagctggtggagccgctgacacctagcggagcgatgcccaaccaggcgcagatgcggatcctgaaagagacggagctgaggaaggtgaaggtgcttggatctggcgcttttggcacagtctacaagggcatctggatccctgatggggagaatgtgaaaattccagtggccatcaaagtgttgagggaaaacacatcccccaaagccaacaaagaaatcttagacgaagcatacgtgatggctggtgtgggctccccatatgtctcccgccttctgggcatctgcctgacatccacggtgcagctggtgacacagcttatgccctatggctgcctcttagaccatgtccgggaaaaccgcggacgcctgggctcccaggacctgctgaactggtgtatgcagattgccaaggggatgagctacctggaggatgtgcggctcgtacacagggacttggccgctcggaacgtgctggtcaagagtcccaaccatgtcaaaattacagacttcgggctggctcggctgctggacattgacgagacagagtaccatgcagatgggggcaaggtgcccatcaagtggatggcgctggagtccattctccgccggcggttcacccaccagagtgatgtgtggagttatggtgtgactgtgtgggagctgatgacttttggggccaaaccttacgatgggatcccagcccgggagatccctgacctgctggaaaagggggagcggctgccccagccccccatctgcaccattgatgtctacatgatcatggtcaaatgttggatgattgactctgaatgtcggccaagattccgggagttggtgtctgaattctcccgcatggccagggacccccagcgctttgtggtcatccagaatgaggacttgggcccagccagtcccttggacagcaccttctaccgctcactgctggaggacgatgacatgggggacctggtggatgctgaggagtatctggtaccccagcagggcttcttctgtccagaccctgccccgggcgctgggggcatggtccaccacaggcaccgcagctcatctaccaggagtggcggtggggacctgacactagggctggagccctctgaagaggaggcccccaggtctccactggcaccctccgaaggggctggctccgatgtatttgatggtgacctgggaatgggggcagccaaggggctgcaaagcctccccacacatgaccccagccctctacagcggtacagtgaggaccccacagtacccctgccctctgagactgatggctacgttgcccccctgacctgcagcccccagcctgaatatgtgaaccagccagatgttcggccccagcccccttcgccccgagagggccctctgcctgctgcccgacctgctggtgccactctggaaagggccaagactctctccccagggaagaatggggtcgtcaaagacgtttttgcctttgggggtgccgtggagaaccccgagtacttgacaccccagggaggagctgcccctcagccccaccctcctcctgccttcagcccagccttcgacaacctctattactgggaccaggacccaccagagcggggggctccacccagcaccttcaaagggacacctacggcagagaacccagagtacctgggtctggacgtgccagtgtgaaccagaaggccaagtccgcagaagccctgatgtgtcctcagggagcagggaaggcctgacttctgctggcatcaagaggtgggagggccctccgaccacttccaggggaacctgccatgccaggaacctgtcctaaggaaccttccttcctgcttgagttcccagatggctggaaggggtccagcctcgttggaagaggaacagcactggggagtctttgtggattctgaggccctgcccaatgagactctagggtccagtggatgccacagcccagcttggccctttccttccagatcctgggtactgaaagccttagggaagctggcctgagaggggaagcggccctaagggagtgtctaagaacaaaagcgacccattcagagactgtccctgaaacctagtactgccccccatgaggaaggaacagcaatggtgtcagtatccaggctttgtacagagtgcttttctgtttagtttttactttttttgttttgtttttttaaagatgaaataaagacccagggggagaatgggtgttgtatggggaggcaagtgtggggggtccttctccacacccactttgtccatttgcaaatatattttggaaaaca

SEQ ID NO: 29 - DNA, 4893 bp, Homo sapien
aattctcgagctcgtcgaccggtcgacgagctcgagggtcgacgagctcgagggcgcgcgcccggcccccacccctcgcagcaccccgcgccccgcgccctcccagccgggtccagccggagccatggggccggagccgcagtgagcaccatggagctggcggccttgtgccgctgggggctcctcctcgccctcttgccccccggagccgcgagcacccaagtgtgcaccggcacagacatgaagctgcggctccctgccagtcccgagacccacctggacatgctccgccacctctaccagggctgccaggtggtgcagggaaacctggaactcacctacctgcccaccaatgccagcctgtccttcctgcaggatatccaggaggtgcagggctacgtgctcatcgctcacaaccaagtgaggcaggtcccactgcagaggctgcggattgtgcgaggcacccagctctttgaggacaactatgccctggccgtgctagacaatggagacccgctgaacaataccacccctgtcacaggggcctccccaggaggcctgcgggagctgcagcttcgaagcctcacagagatcttgaaaggaggggtcttgatccagcggaacccccagctctgctaccaggacacgattttgtggaaggacatcttccacaagaacaaccagctggctctcacactgatagacaccaaccgctctcgggcctgccacccctgttctccgatgtgtaagggctcccgctgctggggagagagttctgaggattgtcagagcctgacgcgcactgtctgtgccggtggctgtgcccgctgcaaggggccactgcccactgactgctgccatgagcagtgtgctgccggctgcacgggccccaagcactctgactgcctggcctgcctccacttcaaccacagtggcatctgtgagctgcactgcccagccctggtcacctacaacacagacacgtttgagtccatgcccaatcccgagggccggtatacattcggcgccagctgtgtgactgcctgtccctacaactacctttctacggacgtgggatcctgcaccctcgtctgccccctgcacaaccaagaggtgacagcagaggatggaacacagcggtgtgagaagtgcagcaagccctgtgcccgagtgtgctatggtctgggcatggagcacttgcgagaggtgagggcagttaccagtgccaatatccaggagtttgctggctgcaagaagatctttgggagcctggcatttctgccggagagctttgatggggacccagcctccaacactgccccgctccagccagagcagctccaagtgtttgagactctggaagagatcacaggttacctatacatctcagcatggccggacagcctgcctgacctcagcgtcttccagaacctgcaagtaatccggggacgaattctgcacaatggcgcctactcgctgaccctgcaagggctgggcatcagctggctggggctgcgctcactgagggaactgggcagtggactggccctcatccaccataacacccacctctgcttcgtgcacacggtgccctgggaccagctctttcggaacccgcaccaagctctgctccacactgccaaccggccagaggacgagtgtggtaagacagggagcccagtgtgcgcactccccatctgccagcacacagcagtgcccagggggccctggcagcagcgttcttggacttgtgcagactgcccgtctctgtgcacccttcttgactcagcacagctctggctggcttggcctcttggcatggcttctctagctgggtcctacctgccttggcatccttccctccccctctgtttctgaaatctcagaactcttcctctccctacatcggccccacctgtccccacccctccagcccacagccatgcccacagccagttccctggttcacttggacctggggcctcccctaaaagtcccctgcggtcccttcctcctcactgcagtgggcgagggcctggcctgccaccagctgtgcgcccgagggcactgctggggtccagggcccacccagtgtgtcaactgcagccagttccttcggggccaggagtgcgtggaggaatgccgagtactgcaggggctccccagggagtatgtgaatgccaggcactgtttgccgtgccaccctgagtgtcagccccagaatggctcagtgacctgttttggaccggaggctgaccagtgtgtggcctgtgcccactataaggaccctcccttctgcgtggcccgctgccccagcggtgtgaaacctgacctctcctacatgcccatctggaagtttccagatgaggagggcgcatgccagccttgccccatcaactgcacccactcctgtgtggacctggatgacaagggctgccccgccgagcagagagccagccctctgacgtccatcatctctgcggtggttggcattctgctggtcgtggtcttgggggtggtctttgggatcctcatcaagcgacggcagcagaagatccggaagtacacgatgcggagactgctgcaggaaacggagctggtggagccgctgacacctagcggagcgatgcccaaccaggcgcagatgcggatcctgaaagagacggagctgaggaaggtgaaggtgcttggatctggcgcttttggcacagtctacaagggcatctggatccctgatggggagaatgtgaaaattccagtggccatcaaagtgttgagggaaaacacatcccccaaagccaacaaagaaatcttagacgaagcatacgtgatggctggtgtgggctccccatatgtctcccgccttctgggcatctgcctgacatccacggtgcagctggtgacacagcttatgccctatggctgcctcttagaccatgtccgggaaaaccgcggacgcctgggctcccaggacctgctgaactggtgtatgcagattgccaaggggatgagctacctggaggatgtgcggctcgtacacagggacttggccgctcggaacgtgctggtcaagagtcccaaccatgtcaaaattacagacttcgggctggctcggctgctggacattgacgagacagagtaccatgcagatgggggcaaggtgcccatcaagtggatggcgctggagtccattctccgccggcggttcacccaccagagtgatgtgtggagttatggtgtgactgtgtgggagctgatgacttttggggccaaaccttacgatgggatcccagcccgggagatccctgacctgctggaaaagggggagcggctgccccagccccccatctgcaccattgatgtctacatgatcatggtcaaatgttggatgattgactctgaatgtcggccaagattccgggagttggtgtctgaattctcccgcatggccagggacccccagcgctttgtggtcatccagaatgaggacttgggcccagccagtcccttggacagcaccttctaccgctcactgctggaggacgatgacatgggggacctggtggatgctgaggagtatctggtaccccagcagggcttcttctgtccagaccctgccccgggcgctgggggcatggtccaccacaggcaccgcagctcatctaccaggagtggcggtggggacctgacactagggctggagccctctgaagaggaggcccccaggtctccactggcaccctccgaaggggctggctccgatgtatttgatggtgacctgggaatgggggcagccaaggggctgcaaagcctccccacacatgaccccagccctctacagcggtacagtgaggaccccacagtacccctgccctctgagactgatggctacgttgcccccctgacctgcagcccccagcctgaatatgtgaaccagccagatgttcggccccagcccccttcgccccgagagggccctctgcctgctgcccgacctgctggtgccactctggaaagggccaagactctctccccagggaagaatggggtcgtcaaagacgtttttgcctttgggggtgccgtggagaaccccgagtacttgacaccccagggaggagctgcccctcagccccaccctcctcctgccttcagcccagccttcgacaacctctattactgggaccaggacccaccagagcggggggctccacccagcaccttcaaagggacacctacggcagagaacccagagtacctgggtctggacgtgccagtgtgaaccagaaggccaagtccgcagaagccctgatgtgtcctcagggagcagggaaggcctgacttctgctggcatcaagaggtgggagggccctccgaccacttccaggggaacctgccatgccaggaacctgtcctaaggaaccttccttcctgcttgagttcccagatggctggaaggggtccagcctcgttggaagaggaacagcactggggagtctttgtggattctgaggccctgcccaatgagactctagggtccagtggatgccacagcccagcttggccctttccttccagatcctgggtactgaaagccttagggaagctggcctgagaggggaagcggccctaagggagtgtctaagaacaaaagcgacccattcagagactgtccctgaaacctagtactgccccccatgaggaaggaacagcaatggtgtcagtatccaggctttgtacagagtgcttttctgtttagtttttactttttttgttttgtttttttaaagatgaaataaagacccagggggagaatgggtgttgtatggggaggcaagtgtggggggtccttctccacacccactttgtccatttgcaaatatattttggaaaaca

SEQ ID NO: 30 - DNA, 1108 bp, Homo sapien
tctagaggatccttgtcgacttctgctctgcgttgaccgaccccagccctctacagcggtacagtgaggaccccacagtacccctgccctctgagactgatggctacgttgcccccctgacctgcagcccccagcctgaatatgtgaaccagccagatgttcggccccagcccccttcgccccgagagggccctctgcctgctgcccgacctgctggtgccactctggaaagggccaagactctctccccagggaagaatggggtcgtcaaagacgtttttgcctttgggggtgccgtggagaaccccgagtacttgacaccccagggaggagctgcccctcagccccaccctcctcctgccttcagcccagccttcgacaacctctattactgggaccaggacccaccagagcggggggctccacccagcaccttcaaagggacacctacggcagagaacccagagtacctgggtctggacgtgccagtgtgaaccagaaggccaagtccgcagaagccctgatgtgtcctcagggagcagggaaggcctgacttctgctggcatcaagaggtgggagggccctccgaccacttccaggggaacctgccatgccaggaacctgtcctaaggaaccttccttcctgcttgagttcccagatggctggaaggggtccagcctcgttggaagaggaacagcactggggagtctttgtggattctgaggccctgcccaatgagactctagggtccagtggatgccacagcccagcttggccctttccttccagatcctgggtactgaaagccttagggaagctggcctgagaggggaagcggccctaagggagtgtctaagaacaaaagcgacccattcagagactgtccctgaaacctagtactgccccccatgaggaaggaacagcaatggtgtcagtatccaggctttgtacagagtgcttttctgtttagtttttactttttttgttttgtttttttaaagatgaaataaagacccagggggagaatgggtgttgtatggggaggcaagtgtggggggtccttctccacacccactttgtccatttgcaaatatattttggaaaaca

SEQ ID NO: 31 - DNA, 783 bp, Homo sapien
ctatacggtcctaaggtagcgacaccctcctcctgccttcagcccagccttcgacaacctctattactgggaccaggacccaccagagcggggggctccacccagcaccttcaaagggacacctacggcagagaacccagagtacctgggtctggacgtgccagtgtgaaccagaaggccaagtccgcagaagccctgatgtgtcctcagggagcagggaaggcctgacttctgctggcatcaagaggtgggagggccctccgaccacttccaggggaacctgccatgccaggaacctgtcctaaggaaccttccttcctgcttgagttcccagatggctggaaggggtccagcctcgttggaagaggaacagcactggggagtctttgtggattctgaggccctgcccaatgagactctagggtccagtggatgccacagcccagcttggccctttccttccagatcctgggtactgaaagccttagggaagctggcctgagaggggaagcggccctaagggagtgtctaagaacaaaagcgacccattcagagactgtccctgaaacctagtactgccccccatgaggaaggaacagcaatggtgtcagtatccaggctttgtacagagtgcttttctgtttagtttttactttttttgttttgtttttttaaagatgaaataaagacccagggggagaatgggtgttgtatggggaggcaagtgtggggggtccttctccacacccactttgtccatttgcaaatatattttggaaaaca

SEQ ID NO: 32 - DNA, 2802 bp, Homo sapien
aattctcgagctcgtcgaccggtcgacgagctcgagggtcgacgagctcgagggcgcgcgcccggcccccacccctcgcagcaccccgcgccccgcgccctcccagccgggtccagccggagccatggggccggagccgcagtgagcaccatggagctggcggccttgtgccgctgggggctcctcctcgccctcttgccccccggagccgcgagcacccaagtgtgcaccggcacagacatgaagctgcggctccctgccagtcccgagacccacctggacatgctccgccacctctaccagggctgccaggtggtgcagggaaacctggaactcacctacctgcccaccaatgccagcctgtccttcctgcaggatatccaggaggtgcagggctacgtgctcatcgctcacaaccaagtgaggcaggtcccactgcagaggctgcggattgtgcgaggcacccagctctttgaggacaactatgccctggccgtgctagacaatggagacccgctgaacaataccacccctgtcacaggggcctccccaggaggcctgcgggagctgcagcttcgaagcctcacagagatcttgaaaggaggggtcttgatccagcggaacccccagctctgctaccaggacacgattttgtggaaggacatcttccacaagaacaaccagctggctctcacactgatagacaccaaccgctctcgggcctgccacccctgttctccgatgtgtaagggctcccgctgctggggagagagttctgaggattgtcagagcctgacgcgcactgtctgtgccggtggctgtgcccgctgcaaggggccactgcccactgactgctgccatgagcagtgtgctgccggctgcacgggccccaagcactctgactgcctggcctgcctccacttcaaccacagtggcatctgtgagctgcactgcccagccctggtcacctacaacacagacacgtttgagtccatgcccaatcccgagggccggtatacattcggcgccagctgtgtgactgcctgtccctacaactacctttctacggacgtgggatcctgcaccctcgtctgccccctgcacaaccaagaggtgacagcagaggatggaacacagcggtgtgagaagtgcagcaagccctgtgcccgagtgtgctatggtctgggcatggagcacttgcgagaggtgagggcagttaccagtgccaatatccaggagtttgctggctgcaagaagatctttgggagcctggcatttctgccggagagctttgatggggacccagcctccaacactgccccgctccagccagagcagctccaagtgtttgagactctggaagagatcacaggttacctatacatctcagcatggccggacagcctgcctgacctcagcgtcttccagaacctgcaagtaatccggggacgaattctgcacaatggcgcctactcgctgaccctgcaagggctgggcatcagctggctggggctgcgctcactgagggaactgggcagtggactggccctcatccaccataacacccacctctgcttcgtgcacacggtgccctgggaccagctctttcggaacccgcaccaagctctgctccacactgccaaccggccagaggacgagtgtgtgggcgagggcctggcctgccaccagctgtgcgcccgagggcactgctggggtccagggcccacccagtgtgtcaactgcagccagttccttcggggccaggagtgcgtggaggaatgccgagtactgcaggggctccccagggagtatgtgaatgccaggcactgtttgccgtgccaccctgagtgtcagccccagaatggctcagtgacctgttttggaccggaggctgaccagtgtgtggcctgtgcccactataaggaccctcccttctgcgtggcccgctgccccagcggtgtgaaacctgacctctcctacatgcccatctggaagtttccagatgaggagggcgcatgccagccttgccccatcaactgcacccactcctgtgtggacctggatgacaagggctgccccgccgagcagagagccaggttggcctggaccccaggatgtacccttcattgcccttcactcccccactggatgctgggtggtcactgctgtagggaggggaccccctgacatatgtcccttcccacccactcttccactgtggaacctcctgtcattttccacttcaccaagtgacagaggacctgctcagatgctgaggggaggggactgcaaggaaagatggctaggaaacccagtccctccacaccctagagtaacttgatgccttgtgagggacacaggcaaagttcaattccttggaagtcaagggagactgagaagagtacagctgcagcactgagggagtgatgaattcttaactggggatggtgggaggcttcgagtgggaggtggcatttgagctaggctttgagagaggagcaggtattgcacttgcatttaggtagaaagcattggggtgcaaggtgacactggagggggaggcatcaggaaatccaggatgtcttcaaagttctggtgtcgggggctgttgagtaagcacaggaataagggggtcaagttagagtcagggtggggtctgacctggatgccataggacctgatccccaagccacagggtgggacttgactgggcagtggggacctttgbgaaaggactttggggagaccaacctgtagtcttgcctatagcaacatccggcccgggtggagcatgtgtacccg

SEQ ID NO: 33 - DNA, 1300 bp, Homo sapien
cgagtgctctactgcgggtgctctactcgcgggtgttctacctcgcgtgtgctctcctcgctcctagatgggatggcggcgggcagagacgctcctcactttccagactgggcagccaggcagaggggctcctcatatcccagacgatgggcggccaggcagagacgctcctcacttcccagacggggtggcggccgggcagaggctgcaatctcggctctttgggaggccaaggcaggcggctgggaggtggttgtagcgagccgagatcacgccactgcactccagccttggcaccattgagcactgagtgaacgagactccgtctgcaatcccggcacctcgggaggccgaggstggyggatcactcgcggttaggagctggagtggaggcgaaaaattacgaagagattgcaaaagttgagaagctcaaaccattagaggtagagctgcgacgcctagaagacctttcagaatctattgttaatgattttgcctacatgaagaagagagaagaggagatgcgtgataccaacgagtcaacaaacactcgggtcctatacttcagcatcttttcaatgttctgtctcattggactagctacctggcaggtcttctacctgcgacgcttcttcaaggccaagaaattgattgagtaatgaatgaggcatattctcctcccaccttgtacctcagccagcagaacatcgctgggacgtgcctggcctaaggcatcctaccaacagcaccatcaaggcacgttggagctttcttgccagaactgatctcttttggtgtgggaggacatggggtaccacctacacccaacaagtcaatgagggacttctttttaatttggtaggattttgactggttttgcaacaataggtctattattagagtcacctatgacaaaaaataggggttacctagataatgccaaagtcagcatttgtcctgggttcccttgtgtgatctgtttggactatgttttcttttcttctcccacttgctcagcagcttgggcttccattctagttcttttaccaagatttttgtgtgaccatgttgacttcatttggattgccctctttcaatttccttgtgaaaacacccttaactttctctttacccttagctgaaatgtttacatagcttctggtgatatcttttcatgattttatatctcttaaaatggtgatggatgtgacacctcataaaagtgagctttgaactgtagataactcttaaagaaaatgtcattttagacaattaaaatatttgtgctcaactgcttgaa

SEQ ID NO: 34 - DNA, 2273 bp, Homo sapien
ccatgtcggcgctgtggcgatttggactttttaacacaggattgggacaggattcagagggacactgtggcccttctacaatcaggagcttcccctttcctctgatgacatcacctgtggctttgttctctttgttccagatggcccagacgaccccaccatttccccctcatacacctattaccgtccaggggtgaacctcagcctctcctgccatgcagcctctaacccacctgcacagtattcttggctgattgatgggaacatccagcaacacacacaagagctctttatctccaacatcactgagaagaacagcggactctatacctgccaggccaataactcagccagtggccacagcaggactacagtcaagacaatcacagtctctgcggagctgcccaagccctccatctccagcaacaactccaaacccgtggaggacaaggatgctgtggccttcacctgtgaacctgaggctcagaacacaacctacctgtggtgggtaaatggtcagagcctcccagtcagtcccaggctgcagctgtccaatggcaacaggaccctcactctattcaatgtcacaagaaatgacgcaagagcctatgtatgtggaatccagaactcagtgagtgcaaaccgcagtgacccagtcaccctggatgtcctctatgggccggacacccccatcatttcccccccagactcgtcttacctttcgggagcgaacctcaacctctcctgccactcggcctctaacccatccccgcagtattcttggcgtatcaatgggataccgcagcaacacacacaagttctctttatcgccaaaatcacgccaaataataacgggacctatgcctgttttgtctctaacttggctactggccgcaataattccatagtcaagagcatcacagtctctgcatctggaacttctcctggtctctcagctggggccactgtcggcatcatgattggagtgctggttggggttgctctgatatagcagccctggtgtagtttcttcatttcaggaagactgacagttgttttgcttcttccttaaagcatttgcaacagctacagtctaaaattgcttctttaccaaggatatttacagaaaagactctgaccagagatcgagaccatcctagccaacatcgtgaaaccccatctctactaaaaatacaaaaatgagctgggcttggtggcgcgcacctgtagtcccagttactcgggaggctgaggcaggagaatcgcttgaacccgggaggtggagattgcagtgagcccagatcgcaccactgcactccagtctggcaacagagcaagactccatctcaaaaagaaaagaaaagaagactctgacctgtactcttgaatacaagtttctgataccactgcactgtctgagaatttccaaaactttaatgaactaactgacagcttcatgaaactgtccaccaagatcaagcagagaaaataattaatttcatgggactaaatgaactaatgaggataatattttcataattttttatttgaaattttgctgattctttaaatgtcttgtttcccagatttcaggaaactttttttcttttaagctatccacagcttacagcaatttgataaaatatacttttgtgaacaaaaattgagacatttacattttctccctatgtggtcgctccagacttgggaaactattcatgaatatttatattgtatggtaatatagttattgcacaagttcaataaaaatctgctctttgtatgacagaatacatttgaaaacattggttatattaccaagactttgactagaatgtcgtatttgaggatataaacccataggtaataaacccacaggtactacaaacaaagtctgaagtcagccttggtttggcttcctagtgtcaattaaacttctaaaagtttaatctgagattccttataaaaacttccagcaaagcaactttaaaaaagtctgtgtgggccgggcgcggtggctcacgcctgtaatcccagcactttgatccgccgaggcgggcggatcacgaggtcaggagatccagaccatcctggctaacacagtgaaaccccgtctctactaaaaatacaaaaaaagttagccgggcgtggtggtgggggcctgtagtcccagctactcaggaggctgaggcaggagaacggcatgaacccgggaggcagggcttgcagtgagccaagatcatgccgctgcactccagcctgggagacaaagt

SEQ ID NO: 35 - DNA, 3462 bp, Homo sapien
ggaagagactcagggcagagggaggaaggacagcagaccagacagtcacagcagccttgacaaaacgttcctggaactcaagctcttctccacagaggaggacagagcagacagcagagaccatggagtctccctcggcccctccccacagatggtgcatcccctggcagaggctcctgctcacagcctcacttctaaccttctggaacccgcccaccactgccaagctcactattgaatccacgccgttcaatgtcgcagaggggaaggaggtgcttctacttgtccacaatctgccccagcatctttttggctacagctggtacaaaggtgaaagagtggatggcaaccgtcaaattataggatatgtaataggaactcaacaagctaccccagggcccgcatacagtggtcgagagataatataccccaatgcatccctgctgatccagaacatcatccagaatgacacaggattctacaccctacacgtcataaagtcagatcttgtgaatgaagaagcaactggccagttccgggtatacccggagctgcccaagccctccatctccagcaacaactccaaacccgtggaggacaaggatgctgtggccttcacctgtgaacctgagactcaggacgcaacctacctgtggtgggtaaacaatcagagcctcccggtcagtcccaggctgcagctgtccaatggcaacaggaccctcactctattcaatgtcacaagaaatgacacagcaagctacaaatgtgaaacccagaacccagtgagtgccaggcgcagtgattcagtcatcctgaatgtcctctatggcccggatgcccccaccatttcccctctaaacacatcttacagatcaggggaaaatctgaacctctcctgccacgcagcctctaacccacctgcacagtactcttggtttgtcaatgggactttccagcaatccacccaagagctctttatccccaacatcactgtgaataatagtggatcctatacgtgccaagcccataactcagacactggcctcaataggaccacagtcacgacgatcacagtctatgcagagccacccaaacccttcatcaccagcaacaactccaaccccgtggaggatgaggatgctgtagccttaacctgtgaacctgagattcagaacacaacctacctgtggtgggtaaataatcagagcctcccggtcagtcccaggctgcagctgtccaatgacaacaggaccctcactctactcagtgtcacaaggaatgatgtaggaccctatgagtgtggaatccagaacgaattaagtgttgaccacagcgacccagtcatcctgaatgtcctctatggcccagacgaccccaccatttccccctcatacacctattaccgtccaggggtgaacctcagcctctcctgccatgcagcctctaacccacctgcacagtattcttggctgattgatgggaacatccagcaacacacacaagagctctttatctccaacatcactgagaagaacagcggactctatacctgccaggccaataactcagccagtggccacagcaggactacagtcaagacaatcacagtctctgcggagctgcccaagccctccatctccagcaacaactccaaacccgtggaggacaaggatgctgtggccttcacctgtgaacctgaggctcagaacacaacctacctgtggtgggtaaatggtcagagcctcccagtcagtcccaggctgcagctgtccaatggcaacaggaccctcactctattcaatgtcacaagaaatgacgcaagagcctatgtatgtggaatccagaactcagtgagtgcaaaccgcagtgacccagtcaccctggatgtcctctatgggccggacacccccatcatttcccccccagactcgtcttacctttcgggagcgaacctcaacctctcctgccactcggcctctaacccatccccgcagtattcttggcgtatcaatgggataccgcagcaacacacacaagttctctttatcgccaaaatcacgccaaataataacgggacctatgcctgttttgtctctaacttggctactggccgcaataattccatagtcaagagcatcacagtctctgcatctggaacttctcctggtctctcagctggggccactgtcggcatcatgattggagtgctggttggggttgctctgatatagcagccctggtgtagtttcttcatttcaggaagactgacagttgttttgcttcttccttaaagcatttgcaacagctacagtctaaaattgcttctttaccaaggatatttacagaaaagactctgaccagagatcgagaccatcctagccaacatcgtgaaaccccatctctactaaaaatacaaaaatgagctgggcttggtggcgcgcacctgtagtcccagttactcgggaggctgaggcaggagaatcgcttgaacccgggaggtggagattgcagtgagcccagatcgcaccactgcactccagtctggcaacagagcaagactccatctcaaaaagaaaagaaaagaagactctgacctgtactcttgaatacaagtttctgataccactgcactgtctgagaatttccaaaactttaatgaactaactgacagcttcatgaaactgtccaccaagatcaagcagagaaaataattaatttcatgggactaaatgaactaatgaggattgctgattctttaaatgtcttgtttcccagatttcaggaaactttttttcttttaagctatccacagcttacagcaatttgataaaatatacttttgtgaacaaaaattgagacatttacattttctccctatgtggtcgctccagacttgggaaactattcatgaatatttatattgtatggtaatatagttattgcacaagttcaataaaaatctgctctttgtatgacagaatacatttgaaaacattggttatattaccaagactttgactagaatgtcgtatttgaggatataaacccataggtaataaacccacaggtactacaaacaaagtctgaagtcagccttggtttggcttcctagtgtcaattaaacttctaaaagtttaatctgagattccttataaaaacttccagcaaagcaactttaaaaaagtctgtgtgggccgggcgcggtggctcacgcctgtaatcccagcactttgatccgccgaggcgggcggatcacgaggtcaggagatccagaccatcctggctaacacagtgaaaccccgtctctactaaaaatacaaaaaaagttagccgggcgtggtggtgggggcctgtagtcccagctactcaggaggctgaggcaggagaacggcatgaacccgggaggcagggcttgcagtgagccaagatcatgccgctgcactccagcctgggagacaaagt

SEQ ID NO: 36 - DNA, 3373 bp, Homo sapien
ggaagagactcagggcagagggaggaaggacagcagaccagacagtcacagcagccttgacaaaacgttcctggaactcaagctcttctccacagaggaggacagagcagacagcagagaccatggagtctccctcggcccctccccacagatggtgcatcccctggcagaggctcctgctcacagcctcacttctaaccttctggaacccgcccaccactgccaagctcactattgaatccacgccgttcaatgtcgcagaggggaaggaggtgcttctacttgtccacaatctgccccagcatctttttggctacagctggtacaaaggtgaaagagtggatggcaaccgtcaaattataggatatgtaataggaactcaacaagctaccccagggcccgcatacagtggtcgagagataatataccccaatgcatccctgctgatccagaacatcatccagaatgacacaggattctacaccctacacgtcataaagtcagatcttgtgaatgaagaagcaactggccagttccgggtatacccggagctgcccaagccctccatctccagcaacaactccaaacccgtggaggacaaggatgctgtggccttcacctgtgaacctgagactcaggacgcaacctacctgtggtgggtaaacaatcagagcctcccggtcagtcccaggctgcagctgtccaatggcaacaggaccctcactctattcaatgtcacaagaaatgacacagcaagctacaaatgtgaaacccagaacccagtgagtgccaggcgcagtgattcagtcatcctgaatgtcctctatggcccggatgcccccaccatttcccctctaaacacatcttacagatcaggggaaaatctgaacctctcctgccacgcagcctctaacccacctgcacagtactcttggtttgtcaatgggactttccagcaatccacccaagagctctttatccccaacatcactgtgaataatagtggatcctatacgtgccaagcccataactcagacactggcctcaataggaccacagtcacgacgatcacagtctatgcagagccacccaaacccttcatcaccagcaacaactccaaccccgtggaggatgaggatgctgtagccttaacctgtgaacctgagattcagaacacaacctacctgtggtgggtaaataatcagagcctcccggtcagtcccaggctgcagctgtccaatgacaacaggaccctcactctactcagtgtcacaaggaatgatgtaggaccctatgagtgtggaatccagaacgaattaagtgttgaccacagcgacccagtcatcctgaatgtcctctatggcccagacgaccccaccatttccccctcatacacctattaccgtccaggggtgaacctcagcctctcctgccatgcagcctctaacccacctgcacagtattcttggctgattgatgggaacatccagcaacacacacaagagctctttatctccaacatcactgagaagaacagcggactctatacctgccaggccaataactcagccagtggccacagcaggactacagtcaagacaatcacagtctctgcggagctgcccaagccctccatctccagcaacaactccaaacccgtggaggacaaggatgctgtggccttcacctgtgaacctgaggctcagaacacaacctacctgtggtgggtaaatggtcagagcctcccagtcagtcccaggctgcagctgtccaatggcaacaggaccctcactctattcaatgtcacaagaaatgacgcaagagcctatgtatgtggaatccagaactcagtgagtgcaaaccgcagtgacccagtcaccctggatgtcctctatgggccggacacccccatcatttcccccccagactcgtcttacctttcgggagcgaacctcaacctctcctgccactcggcctctaacccatccccgcagtattcttggcgtatcaatgggataccgcagcaacacacacaagttctctttatcgccaaaatcacgccaaataataacgggacctatgcctgttttgtctctaacttggctactggccgcaataattccatagtcaagagcatcacagtctctgacagttgttttgcttcttccttaaagcatttgcaacagctacagtctaaaattgcttctttaccaaggatatttacagaaaagactctgaccagagatcgagaccatcctagccaacatcgtgaaaccccatctctactaaaaatacaaaaatgagctgggcttggtggcgcgcacctgtagtcccagttactcgggaggctgaggcaggagaatcgcttgaacccgggaggtggagattgcagtgagcccagatcgcaccactgcactccagtctggcaacagagcaagactccatctcaaaaagaaaagaaaagaagactctgacctgtactcttgaatacaagtttctgataccactgcactgtctgagaatttccaaaactttaatgaactaactgacagcttcatgaaactgtccaccaagatcaagcagagaaaataattaatttcatgggactaaatgaactaatgaggataatattttcataattttttatttgaaattttgctgattctttaaatgtcttgtttcccagatttcaggaaactttttttcttttaagctatccacagcttacagcaatttgataaaatatacttttgtgaacaaaaattgagacatttacattttctccctatgtggtcgctccagacttgggaaactattcatgaatatttatattgtatggtaatatagttattgcacaagttcaataaaaatctgctctttgtatgacagaatacatttgaaaacattggttatattaccaagactttgactagaatgtcgtatttgaggatataaacccataggtaataaacccacaggtactacaaacaaagtctgaagtcagccttggtttggcttcctagtgtcaattaaacttctaaaagtttaatctgagattccttataaaaacttccagcaaagcaactttaaaaaagtctgtgtgggccgggcgcggtggctcacgcctgtaatcccagcactttgatccgccgaggcgggcggatcacgaggtcaggagatccagaccatcctggctaacacagtgaaaccccgtctctactaaaaatacaaaaaaagttagccgggcgtggtggtgggggcctgtagtcccagctactcaggaggctgaggcaggagaacggcatgaacccgggaggcagggcttgcagtgagccaagatcatgccgctgcactccagcctgggagacaaagt

SEQ ID NO: 37 - DNA, 827 bp, Homo sapien
catgtcgagcggcgcagtgtgatggatgcgtggtcgcggcgaggtgccgccgactcacacaaggcagagttgccatggagaaaattccagtgtcagcattcttgctccttgtggccctctcctacactctggccagagataccacagtcaaacctggagccaaaaaggacacaaaggactctcgacccaaactgccccagaccctctccagaggttggggtgaccaactcatctggactcagacatatgaagaagctctatataaatccaagacaagcaacaaacccttgatgattattcatcacttggatgagtgcccacacagtcaagctttaaagaaagtgtttgctgaaaataaagaaatccagaaattggcagagcagtttgtcctcctcaatctggtttatgaaacaactgacaaacacctttctcctgatggccagtatgtccccaggattatgtttgttgacccatctctgacagttagagccgatatcactggaagatattcaaatcgtctctatgcttacgaacctgcagatacagctctgttgcttgacaacatgaagaaagctctcaagttgctgaagactgaattgtaaagaaaaaaaatctccaagcccttctgtctgtcaggccttgagacttgaaaccagaagaagtgtgagaagactggctagtgtggaagcatagtgaacacactgattaggttatggtttaatgttacaacaactattttttaagaaaaacatgttttagaaatttggtttcaagtgtacctcggccgcgaccacgatccatcacactgcgccgctcggcatgcatct

SEQ ID NO: 38 - DNA, 810 bp, Homo sapien
tgctgctcgagcggcgcagtgtgatggatcgtggtcgcggccgaggtcagagttgccatggagaaaattccagtgtcagcattcttgctccttgtggccctctcctacactctggccagagataccacagtcaaacctggagccaaaaaggacacaaaggactctcgacccaaactgccccagaccctctccagaggttggggtgaccaactcatctggactcagacatatgaagaagctctatataaatccaagacaagcaacaaacccttgatgattattcatcacttggatgagtgcccacacagtcaagctttaaagaaagtgtttgctgaaaataaagaaatccagaaattggcagagcagtttgtcctcctcaatctggtttatgaaacaactgacaaacacctttctcctgatggccagtatgtccccaggattatgtttgttgacccatctctgacagttagagccgatatcactggaagatattcaaatcgtctctatgcttacgaacctgcagatacagctctgttgcttgacaacatgaagaaagctctcaagttgctgaagactgaattgtaaagaaaaaaaatctccaagcccttctgtctgtcaggccttgagacttgaaaccagaagaagtgtgagaagactggctagtgtggaagcatagtgaacacactgattaggttatggtttaatgttacaacaactattttttaagaaaaacatgttttagaaatttggtttcaagtgtacctcggccgcgaccacgatccatcacactgcgccgctcggcatgcatct

SEQ ID NO: 39 - DNA, 716 bp, Homo sapien
  misc_feature (321)..(322): n=a, c, g or t
  misc_feature (351)..(351): n=a, c, g or t
  misc_feature (357)..(358): n=a, c, g or t
  misc_feature (376)..(376): n=a, c, g or t
  misc_feature (400)..(400): n=a, c, g or t
  misc_feature (409)..(409): n=a, c, g or t
  misc_feature (430)..(430): n=a, c, g or t
  misc_feature (446)..(446): n=a, c, g or t
  misc_feature (461)..(461): n=a, c, g or t
  misc_feature (478)..(478): n=a, c, g or t
ggctagaacccgggaggtggagattgcagtgagcgcagatggcaacactgcacgccagtctggcaacagagcaagactacatctcaaaaagaaaagaaaagaagactctgacctgtactctggaatacaagtttctgataccactgcactgtctgagaatttccwaaactttaatgaactaactgacagcttcatgaaactgtccaccaagatcaagcagagaaaatawtaatttatgggactwaatgractwatgwgargrtrctattttcatcaattttttatcttgaaattttgcttgattctttaatatgtcttgtnntcccagatttcagcgaaactttttttctntttaanngctatccacagcttacangcaatttggataaaatatactttntgtgaacanaaaattggagacatttacatntttctcctctatgtgngtcgctccaagacanttgggaaactattcatngaatatttatattcgtatggtaatatagcttattgcacaagttcaataaaaatctgctctttgtatgacagaatacatttgaaaacattggttatattaccaagactttgactagaatgtcgtatttgaggatataaacccataggtaataaacccacaggtactacaaacaaagtctgaagtcagccttggtttggcttcctagtgtcacttaaacttctaaaaagttaatctgaga

SEQ ID NO: 40 - DNA, 467 bp, Homo sapien
cggtggtcgcggcgaggtacacttgaaaccaaatttctaasaactgttktcttaaaaartagttggkgtaacattaaaccataacctaatcagkgtgtycactatgcttccacagtagccagtcttctcacacttcttctggtttcaagtctcaagggcctgayagacagaagggsytggagatttktkttctttayaattcagtcttcagcaasttgagagctttcttcatgtkgtcragcaacagagctgtatctgsaggttcgtaagcatagagacgattagaatatcttccagtgatatcggctctaactgtcagagatgggtcaacrragacataatcctggggacatactggccatcaggagaaaggtgttgtcagttgtttcataaaccagattgaggaggacaaactgctctgccaatttctggatttctttattttcagcaaacactttctttaaagc

SEQ ID NO: 41 - DNA, 997 bp, Homo sapien
gagcggccgcccgggcaggtctagccgccgactcacacaaggcaggtgggtgaggaaatccagagttgccatggagaaaattccagtgtcagcattcttgctccttgtggccctctcctacactctggccagagataccacagtcaaacctggagccaaaaaggacacaaaggactctcgacccaaaactgccccagaccctctccagaggttggggtgaccaactcatctggactcagacatatgaagaagctctatataaatccaagacaagcaacaaacccttgatgattattcatcacttggatgagtgcccacacagtcaagctttggagaaagtgtttgctgaaaataaagraatccyryaattggcagagcagwtkgtcctcctcaatctggtttatgaawcmactgacsaaccctttctcctgatggccmgtatgtccccmggattatgtwkgtwgacccatctctgacmrttwgagccgatwtcactggawgatattcmaamcgtctytrtgcttacgaacmtgcagatacacgtcatctagaagattgacaacaatcttctgtgtgtcaggccgttgagacttggaatcaagaatgaagtgtggcgaagactggttagtgtggaagatatagtgtagcacactgattaggttatggtaaaatgtgtacaataactattattaagaaaaagagtggatgacatttgggagcaagtgtactatgttgtgatagaccaattagttgttattacgtgccataagtgaagccgatgattattcgaaaaaatacaattatattgttctggggggtggaactacactaaagaacggcgcgctgctcaaaaatttccagacaagggcccaatctttggacaaccaacctaatgacaaaccgggccccgaatgagcacataatacaataagaaggccgcgttaactagtacctggaaaacgcgacagcgttgggcaagcccaccgggtgcgagggc

SEQ ID NO: 42 - DNA, 1018 bp, Homo sapien
cgagcggcgcctatgtgatggatgagcggcgccgggcaggtctagccgccgactcacacaaggcaggtgggtgaggaaatccagagttgccatggagaaaattccagtgtcagcattcttgctccttgtggccctctcctacactctggccagagataccacagtcaaacctggagccaaaaaggacacaaaggactctcgacccaaaactgccccagaccctctccagaggttggggtgaccaactcatctggactcagacatatgaagaagctctatataaatccaagacaagcaacaaacccttgatgattattcatcacttggatgagtgcccacacagtcaagctttggagaaagtgtttgctgaaaataaagraatccyryaattggcagagcagwtkgtcctcctcaatctggtttatgaawcmactgacsaaccctttctcctgatggccmgtatgtccccmggattatgtwkgtwgacccatctctgacmrttwgagccgatwtcactggawgatattcmaamcgtctytrtgcttacgaacmtgcagatacacgtcatctagaagattgacaacaatcttctgtgtgtcaggccgttgagacttggaatcaagaatgaagtgtggcgaagactggttagtgtggaagatatagtgtagcacactgattaggttatggtaaaatgtgtacaataactattattaagaaaaagagtggatgacatttgggagcaagtgtactatgttgtgatagaccaattagttgttattacgtgccataagtgaagccgatgattattcgaaaaaatacaattatattgttctggggggtggaactacactaaagaacggcgcgctgctcaaaaatttccagacaagggcccaatctttggacaaccaacctaatgacaaaccgggccccgaatgagcacataatacaataagaaggccgcgttaactagtacctggaaaacgcgacagcgttgggcaagcccaccgggtgcgagggc

SEQ ID NO: 43 - DNA, 1010 bp, Homo sapien
cagtgtgatggatagcgtggtcgcggccgaggtctagccgccgactcacacaaggcaggtgggtgaggaaatccagagttgccatggagaaaattccagtgtcagcattcttgctccttgtggccctctcctacactctggccagagataccacagtcaaacctggagccaaaaaggacacaaaggactctcgacccaaaactgccccagaccctctccagaggttggggtgaccaactcatctggactcagacatatgaagaagctctatataaatccaagacaagcaacaaacccttgatgattattcatcacttggatgagtgcccacacagtcaagctttggagaaagtgtttgctgaaaataaagraatccyryaattggcagagcagwtkgtcctcctcaatctggtttatgaawcmactgacsaaccctttctcctgatggccmgtatgtccccmggattatgtwkgtwgacccatctctgacmrttwgagccgatwtcactggawgatattcmaamcgtctytrtgcttacgaacmtgcagatacacgtcatctagaagattgacaacaatcttctgtgtgtcaggccgttgagacttggaatcaagaatgaagtgtggcgaagactggttagtgtggaagatatagtgtagcacactgattaggttatggtaaaatgtgtacaataactattattaagaaaaagagtggatgacatttgggagcaagtgtactatgttgtgatagaccaattagttgttattacgtgccataagtgaagccgatgattattcgaaaaaatacaattatattgttctggggggtggaactacactaaagaacggcgcgctgctcaaaaatttccagacaagggcccaatctttggacaaccaacctaatgacaaaccgggccccgaatgagcacataatacaataagaaggccgcgttaactagtacctggaaaacgcgacagcgttgggcaagcccaccgggtgcgagggc

SEQ ID NO: 44 - DNA, 376 bp, Homo sapien
cagtgtgatggatagcgtggtcgcggccgaggttctatataaatccaagacaagcaacaaacccttgatgattattcatcacttggatgagtgcccacacagtcaagctttggagaaagtgtttgctgaaaataaagraatccyryaattggcagagcagwtkgtcctcctcaatctggtttatgaawcmactgacsaaccctttctcctgatggccmgtatgtccccmggattatgtwkgtwgacccatctctgacmrttwgagccgatwtcactggawgatattcmaamcgtctytrtgcttacgaacmtgcagatacagctctgttgcttgacaaacatgaagaaagctttcaagttgctgaagactgaattg

SEQ ID NO: 45 - DNA, 917 bp, Homo sapien
agcggcgcagtgtgatggatgtcgcggccgaggtaccctgatgctacagacgaggacatcacctcacacatggaaagcgaggagttgaatggtgcatacaaggccatccccgttgcccaggacctgaacgcgccttctgattgggacagccgtgggaaggacagttatgaaacgagtcagctggatgaccagagtgctgaaacccacagccacaagcagtccagattatataagcggaaagcyaatgatgagagcaatgagcattccgatgtgattgatagtcaggaactttccaaagtcagccgtgaattccacagccatgaatttcacagccatgaagatatgctggttgtagacccccaaaagtaaggaagaagataaacacctgaaatttcgtatttctcatgaattagatagtgcatcttctgaggtcaattaaaaggagaaaaaatacaatttctcactttgcatttagtcaaaagaaaaaatgctttatagcaaaatgaaagagaacatgaaatgcttctttctcagtttattggttgaatgtgtatctatttgagtctggaaataactaatgtgtttgataattagtttagtttgtggcttcatggaaactccctgtaaactaaaagcttcagcggtaaatccatgggcccattagcctgtttttccctggttgtggaaaattggtttaatccgctccaacaaattccacccatttcggacgccgaacaaacacacttagggttaccgcctgggggccacagcaatagaaacacccccaatatgctgacaaaggcccaccattcgacagagaaaaaatccacgatgataaaaacagcaacccgagagaaagcggtagaaaaccgcgaacagccacgcccagaatagcacacttcctggcgagaagaaaa

SEQ ID NO: 46 - DNA, 4163 bp, Homo sapien
catgcgttcacatacagcaccacaaccactttctggtacctttttggaccttctttggtgcaaccctaattggaaaagcaataataaaaatgcatatccagaaaatttttgttataataacattcagcaagcacatagtggagcaaatggtggctttcattgggctggaggacaatggcgcactgcaacctccacctcccagtgctgtccccggcataggtccatctctgcagaagccatttcaggagtacctggaggctcaacggcagaagcttcaccacaaaagcgaaatgggcacaccacaggtaagactttaatccggtttcttctcccctctgggaagtttcgggctgaaattacattcacagctctcactcacatttttaggcaaataagtgaagttggtttgccagtgttccttgacagaagttgagcgtctgtgtatgctctactgggaaatttgtctttgtcttagactagaaagtgtaacttctgtacatcttctcctaaaaacaagggtagagccaatggaaagtaatggttctgttacatagaatgagttgttgccttgatcttaaatgatgtattggtagatatacttcccaagtggattaaaaagttaaaacttacagcataacaaagtattagacttactgaggtgacttgaatatctccttttgattttcactctatttttcttttcacccatgggaaaatgataattttttaataaaccaaggctcttaccatagctgaactttaaaacttagactgtcttttctgtaaacgattctgaggcaaagggaaatgactagaagaggatgagtaaacaataacctgaaatgggaaactcgagggaagcacaggttttttttgttttgttttgtttggttcgttttttgttctttggggtttttttgagacagaatttcgctctcgttgcccaagttggagtgcaatggcgcgatcttggctcactgcaacctccgcctcccgggttcaagcgattctcctgcctcagcctcccaagtagctgtgattccaggcacgtgccaccacaccagctaattttttgtattttaatagaaacagggtttcaccgtgttagccaggctggtctcaaactgacctcagatgatccgcccgccttggcctcccaaagtgctgggattacagatgtgagccaccgcgcccggccagagcactgttttttttaatggccttgcactcttcttatggacctttgctgccctcagttgaccaaacatgacatcagaaacagatacatttgtgtgttttaaaaacagctcctaatactggaacaaaaatatttaactgtcttgacaatactcatgagtatctgcatggcgacttcagagttgagtttaatcaaagagtttattcttaggtcctagtagaagagctaacctcacactcatcccattctaaactatgtgattcaacactgattttacatccaacaaagtgaaatcttgatagttgggtgtaaaaaggagagtaatggagatttcagagtagttggggttgcttacttttcatttttaattctttaggttttgtaagttacacacttcaagcattatagatgatcctctttttactactgaactaatgaagcctttttcattgcattgttctgcatttatttctacagggagaaaactggttgtcctggatgtttgaaaagttggtcgttgtcatggtgtgttacttcatcctatctatcattaactccatggcacaaagttatgccaaacgaatccagcagcggttgaactcagaggagaaaactaaataagtagagaaagttttaaactgcagaaattggagtggatgggttctgccttaaattgggaggactccaagccgggaaggaaaattcccttttccaacctgtatcaatttttacaacttttttcctgaaagcagtttagtccatactttgcactgacatactttttccttctgtgctaaggtaaggtatccaccctcgatgcaatccaccttgtgttttcttagggtggaatgtgatgttcagcagcaaacttgcaacagactggccttctgtttgttactttcaaaaggcccacatgatacaattagagaattcccaccgcacaaaaaaagttcctaagtatgttaaatatgtcaagctttttaggcttgtcacaaatgattgctttgttttcctaagtcatcaaaatgtatataaattatctagattggataacagtcttgcatgtttatcatgttacaatttaatattccatcctgcccaacccttcctctcccatcctcaaaaaagggccattttatgatgcattgcacaccctctggggaaattgatctttaaattttgagacagtataaggaaaatctggttggtgtcttacaagtgagctgacaccattttttattctgtgtatttagaatgaagtcttgaaaaaaactttataaagacatctttaatcattccaaaattgtgtccgttttcttgagcgttttgattttttacttttagcttataccagctgaatggcagccttgcctaatccacctacaacaagaatttcttaagctttcttttatttgcatgagagagccactaccaaggcatgttttgttatgctgaaactgggctgctgcatactgctaaatggcacctctgggattggcctacctggggatttcttggtttgtgaaaacaggagaggagaaatatctcatacaagtgaaaggatactggagagagaaattacccatttctaaaaaaaaaccacactctgtcgtatctgtgttaatgttttctagcatgtactctggtttcaacagacacaaatttatatgttaacccagttttcttgccgttctgtaagtgttttattcttagtgtgatttttttccattgggatgtttttgattgaacttgttcattttgttttgcttgggaggaaaataaacaattttacttttttcctttaggagcattatgagcattatgtcagaatagaatagaattggggttcgatcttaacaggccagaaatgcctgggtttttttggtttgtttttgtttttgtttttttatcaaatcctgcctgactgtctgcttgttttgcctaccatcgtgacatctccatggctgtaccaccttgtcgggtagcttatcagactgatgttgactgttgaatctcatggcaacaccagtcgatgggctgtctgacattttggtatctttcatctgaccatccatatccaatgttctcatttaaacattacccagcatcattgtttataatcagaaactctggtccttctgtctggtggcacttagagtcttttgtgccataatgcagcagtatggagggaggattttatggagaaatggggatagtcttcatgaccacaaataaataaaggaaaactaagctgcattgtgggttttgaaaaggttattatacttcttaacaattctttttttcagggacttttctagctgtatgactgttacttgaccttctttgaaaagcattcccaaaatgctctattttagatagattaacattaaccaacataattttttttagatcgagtcagcataaatttctaagtcagcctctagtcgtggttcatctctttcacctgcattttatttggtgtttgtctgaagaaaggaaagaggaaagcaaatacgaattgtactatttgtaccaaatctttgggattcattggcaaataatttcagtgtggtgtattattaaatagaaaaaaaaaattttgtttcctaggttgaaggtctaattgatacgtttgacttatgatgaccatttatgcactttcaaatgaatttgctttcaaaataaatgaagagcagctgtccttctttcctcttttaagtgttcagctgtggcatgctcagaggttcctgctggattccagctggagcggtgtgatacccttctttttcagctgttcgtgccttcctttcttgtatccaccaaagtggagacaaatacatgatctcaaagatacacagtacctacttaattccagctgatgggagaccaaagaatttgcaagtggatggtttggtatcactgtaaataaaaagagggcctgggaattcttgcgattccatctcta

SEQ ID NO: 47 - DNA, 464 bp, Homo sapien
ggtgactctgaggatccccgattcgatccggacgggcccggctcttcgacgtgcgctctcgcgaggaggcggcagctgggaccatcccaggggcgctcaacatcccggtgtccgagttggagagtgctctgcagatggagccagctgccttccaggctttatattctgctgagaagccaaagctggaagatgagcatctcgttttcttctgtcagatgggcaagcggggcctccaggccacgcagctggcccggagtcttggatacactggggctcgcaactacgctggagcctatagagaatggttggagaaagagagttaggcaggaggcagcttactgattgccaccccctggccccttaatggccaccttaactaagggtgtgaacgggctgacttggtgaattgggcaactccttatagtgttgtgcacacatcgcatacggggactcctctatgagtc

SEQ ID NO: 48 - DNA, 806 bp, Homo sapien
gggaaaagctctgtgccatcctcaaattgcaatggcccaggtcccaccagggacacctagacgtgggctccccagacatcagggcctgggtcatgccacccacctccaccaagctgtcttctgctgggtggccgagggcatgagggcagacaccacgtgtagccctagggtggcagtgggcactgcagcagaggggctgttgctcagagtccacatgtgggggaagggagatgttgcaggcgccgagagggcgggccagggccgcactccggagactcgcggttgctacgcgcaccatggctggaggctgtcgcgccccttcctcagcgcccacggtctcgcttcctgaactccgttcactcctagcctccggacgggcccggctcttcgacgtgcgctctcgcgaggaggcggcagctgggaccatcccaggggcgctcaacatcccggtgtccgagttggagagtgctctgcagatggagccagctgccttccaggctttatattctgctgagaagccaaagctggaagatgagcatctcgttttcttctgtcagatgggcaagcggggcctccaggccacgcagctggcccggagtcttggatacactggggctcgcaactacgctggagcctatagagaatggttggagaaagagagttaggcaggaggcagcttactgattgccaccccctggccccttaatggccaccttaactaagggtgtgaacgggctgacttggtgaattgggcaactccttatagtgttgtgcacacatcgcatacggggactcctctatgagtc

SEQ ID NO: 49 - DNA, 743 bp, Homo sapien
gggaaaagctctgtgccatcctcaaattgcaatggcccaggtcccaccagggacacctagacgtgggctccccagacatcagggcctgggtcatgccacccacctccaccaagctgtcttctgctgggtggccgagggcatgagggcagacaccacgtgtagccctagggtggcagtgggcactgcagcagaggggctgttgctcagagtccacatgtgggggaagggagatgttgcaggcgccgagagggcgggccagggccgcactccggagactcgcggttgctacgcgcaccatggctggagccggacgggcccggctcttcgacgtgcgctctcgcgaggaggcggcagctgggaccatcccaggggcgctcaacatcccggtgtccgagttggagagtgctctgcagatggagccagctgccttccaggctttatattctgctgagaagccaaagctggaagatgagcatctcgttttcttctgtcagatgggcaagcggggcctccaggccacgcagctggcccggagtcttggatacactggggctcgcaactacgctggagcctatagagaatggttggagaaagagagttaggcaggaggcagcttactgattgccaccccctggccccttaatggccaccttaactaagggtgtgaacgggctgacttggtgaattgggcaactccttatagtgttgtgcacacatcgcatacggggactcctctatgagtc

SEQ ID NO: 50 - DNA, 461 bp, Homo sapien
agatgttgcaggcgccgagaggacccggacgggcccggctcttcgacgtgcgctctcgcgaggaggcggcagctgggaccatcccaggggcgctcaacatcccggtgtccgagttggagagtgctctgcagatggagccagctgccttccaggctttatattctgctgagaagccaaagctggaagatgagcatctcgttttcttctgtcagatgggcaagcggggcctccaggccacgcagctggcccggagtcttggatacactggggctcgcaactacgctggagcctatagagaatggttggagaaagagagttaggcaggaggcagcttactgattgccaccccctggccccttaatggccaccttaactaagggtgtgaacgggctgacttggtgaattgggcaactccttatagtgttgtgcacacatcgcatacggggactcctctatgagtc

SEQ ID NO: 51 - DNA, 993 bp, Homo sapien
gggaaaagctctgtgccatcctcaaattgcaatggcccaggtcccaccagggacacctagacgtgggctccccagacatcagggcctgggtcatgccacccacctccaccaagctgtcttctgctgggtggccgagggcatgagggcagacaccacgtgtagccctagggtggcagtgggcactgcagcagaggggctgttgctcagagtccacatgtgggggaagggagatgttgcaggcgccgagagggcgggccagggccgcactccggagactcgcggttgctacgcgcaccatggctggaggtacctgcgggggattcctggggccgcggttctcttggtcctctgggttgaggcgtggcagggagtggggtggcggacgaaggggcgtggctgaggggtcttcgtgcacaccctaccgggaggggcgctgccaggtgaggggatgccatggcggccgtgactcctaggccccctcttcctgaaggctgtcgcgccccttcctcagcgcccacggtctcgcttcctgaactccgttcactcctagcctccggacgggcccggctcttcgacgtgcgctctcgcgaggaggcggcagctgggaccatcccaggggcgctcaacatcccggtgtccgagttggagagtgctctgcagatggagccagctgccttccaggctttatattctgctgagaagccaaagctggaagatgagcatctcgttttcttctgtcagatgggcaagcggggcctccaggccacgcagctggcccggagtcttggatacactggggctcgcaactacgctggagcctatagagaatggttggagaaagagagttaggcaggaggcagcttactgattgccaccccctggccccttaatggccaccttaactaagggtgtgaacgggctgacttggtgaattgggcaactccttatagtgttgtgcacacaaaagcatcaaataaagaacatttaatcaaa

SEQ ID NO: 52 - DNA, 1468 bp, Homo sapien
gggaaaagctctgtgccatcctcaaattgcaatggcccaggtcccaccagggacacctagacgtgggctccccagacatcagggcctgggtcatgccacccacctccaccaagctgtcttctgctgggtggccgagggcatgagggcagacaccacgtgtagccctagggtggcagtgggcactgcagcagaggggctgttgctcagagtccacatgtgggggaagggagatgttgcaggcgccgagagggcgggccagggccgcactccggagactcgcggttgctacgcgcaccatggctggaggtacctgcgggggattcctggggccgcggttctcttggtcctctgggttgaggcgtggcagggagtggggtggcggacgaaggggcgtggctgaggggtcttcgtgcacaccctaccgggaggggcgctgccaggtgaggggatgccatggcggccgtgactcctaggccccctcttcctgaaggctgtcgcgccccttcctcagcgcccacggtctcgcttcctgaactccgttcactcctagcctccggacgggcccggctcttcgacgtgcgctctcgcgaggaggcggcagctgggaccatcccaggggcgctcaacatcccgggtatagggtggagaggggacgcccaggtggtggaatagagaccgttcaggaggttctttgccaatgggacctcatttaggatggaatggggaaggcactgattatgggggtcctgcattcccgggagccagccctcagcttccgtaggaaggactgatggggggcggatcttggcatcggaactggcccatccagtttgagaagacagcaggcggagaggagaggggcagaccagcttctcttgacctccccaaatctggacgcctgagggggcatcccgccccgcctcctcacagcttagggagtggcttgcattcaaaagttgtcggtttctgttccttgaaattggggtgggggtaggggatggttatcatatgttgtttgggggcccccaggacccagcccttccaggcccagcttccgaacctgagtgccaaattgctggctttcccttctaccctctccactcctccagtgtccgagttggagagtgctctgcagatggagccagctgccttccaggctttatattctgctgagaagccaaagctggaagatgagcatctcgttttcttctgtcagatgggcaagcggggcctccaggccacgcagctggcccggagtcttggatacactggggctcgcaactacgctggagcctatagagaatggttggagaaagagagttaggcaggaggcagcttactgattgccaccccctggccccttaatggccaccttaactaagggtgtgaacgggctgacttggtgaattgggcaactccttatagtgttgtgcacacaaaagcatcaaataaagaacatttaatcaaa

SEQ ID NO: 53 - DNA, 742 bp, Homo sapien
gggaaaagctctgtgccatcctcaaattgcaatggcccaggtcccaccagggacacctagacgtgggctccccagacatcagggcctgggtcatgccacccacctccaccaagctgtcttctgctgggtggccgagggcatgagggcagacaccacgtgtagccctagggtggcagtgggcactgcagcagaggggctgttgctcagagtccacatgtgggggaagggagatgttgcaggcgccgagagggcgggccagggccgcactccggagactcgcggttgctacgcgcaccatggctggagtgtccgagttggagagtgctctgcagatggagccagctgccttccaggctttatattctgctgagaagccaaagctggaagatgagcatctcgttttcttctgtcagatgggcaagcggggcctccaggccacgcagctggcccggagtcttggatacactggggctcgcaactacgctggagcctatagagaatggttggagaaagagagttaggcaggaggcagcttactgattgccaccccctggccccttaatggccaccttaactaagggtgtgaacgggctgacttggtgaattgggcaactccttatagtgttgtgcacacaaaagcatcaaataaagaacatttaatcaaaaaaaaagagtagaaaaagagaaaaaactttggggggggcgttgggcccttggaaaaagtttttaagaccattggtgg

SEQ ID NO: 54 - DNA, 7702 bp, Homo sapien
gtagaactccttgatttacaatgtatctaactaccaaagcttcattgtacatccctccagcacatccgcctctttcgaaggcgagtgtgaggtccgccaggatcccaggagcccatcccgcttcctggtgttcttctacccggaggacgttcggcagaaggttctggagagaaaaaatcatgagttggtatggcaaggaaaaggaacattcaagttaactgtccagttacctgcaaccccagatgaaatcgatcatgtctttgaagaggaacttctaacaaaagaatccaagaccaaagaagatgttaaagaaccagatgtgtcagaagaattggatacaaaactccctcttgatggtggattagacaaaatggaagatatcccagaggaatgtgaaaatatttcctctttggtggcatttgaaaacctcaaggcaaatgtgactgacataatgctaatcttgttagtggagaacataagtggcctgtctaatgatgactttcaagtggaaataataagagattttgatgttgctgttgttacctttcaaaagcacatagatactataagatttgttgatgattgtaccaagcaccattcaattaaacaacttcagctttctccaagacttctggaagtgacaaacacaatcagggttgaaaacctgccacctggtgctgatgactacagtttaaaacttttctttgaaaatccctataatggagggggaagagttgccaatgttgaatattttcctgaagagagttcagctctgattgaattttttgacagaaaagtgttagacaccatcatggccacaaaactcgacttcaataaaatgccactttctgtgttcccatactatgcctcattgggcacagccttgtatggaaaggagaagcctctgatcaagcttccagcaccatttgaagagtcactagatcttcccttatggaagttcttacagaaaaagaatcacctcattgaggagataaacgatgaaatgaggcgttgtcactgtgagctcacgtggtcccaactcagtggtaaagttaccatcagaccagcagccaccttagtcaatgaaggaagaccgagaatcaagacctggcaggcagatacttccacaacactctctagcatcaggtctaaatataaagtcaacccaattaaagtggatccaacaatgtgggacaccataaaaaatgatgtgaaagatgacaggattttgattgagtttgatacacttaaggagatggtaatcttagcagggaaatcagaggatgtccaaagcattgaggtacaagtcagggagttaatagaaagcactactcaaaaaattaaaagggaagagcaaagtttgaaggaaaaaatgatcatttctccaggcaggtattttcttttgtgtcacagcagtctactggaccatttactcacggagtgcccagagatagagatttgttacgatagagtcactcaacacttgtgcttgaaaggacctagtgcagatgtgtataaagcaaagtgtgaaatccaggaaaaggtgtacaccatggctcagaaaaacattcaggtttctcctgagatttttcagtttttgcaacaggtaaactggaaagaattctctaagtgtcttttcatagcacagaagattcttgcactttatgagctagagggtacaactgttctcttaaccagctgttcttctgaagccctgttagaagcagaaaagcaaatgctcagtgccttaaattataagcgcattgaagttgagaacaaagaagttcttcatggcaagaaatggaaagggctcactcacaatttgcttaagaaacaaaattcctccccaaacactgtaatcatcaatgagttaacttcagaaaccacagctgaagtcatcattacaggctgtgtaaaagaagtaaatgaaacctataaattgctttttaacttcgttgaacaaaacatgaaaatagagagactggttgaagtaaagccttccttagttattgactatttaaagacagaaaagaagctattctggccaaagataaagaaggtaaatgtgcaggtaagtttcaatcctgagaacaaacaaaaaggcattttactaactggctcaaagaccgaagtactgaaggcagtggacattgtcaagcaagtctgggattcagtctgtgttaaaagtgtccatactgataagccaggagccaagcagttcttccaggataaagcacggttttatcaaagtgagatcaaacggttgtttggttgttacattgaactacaggagaatgaagtaatgaaggagggaggcagccccgctgggcagaagtgcttctctcggacagtcttggcccctggcgttgtgctgattgtgcagcagggtgacttggcacggcttcctgtcgatgtggtggtgaatgcatctaatgaggaccttaagcattatggtggcctggccgctgcgctctcaaaagcagctggccctgagctccaggccgactgtgaccagatagtgaagagagagggcagactcctaccgggcaatgccaccatctccaaggcaggaaagctgccctaccaccacgtgatccatgcagtggggccccgctggagcggatatgaggccccgaggtgtgtgtacctattaaggagagctgtgcaactcagtctctgtctagccgaaaaatacaagtaccgatccatagccatcccagctattagttctggagtctttggctttcccttaggccgatgcgtggagaccattgtttctgccatcaaggaaaacttccaattcaagaaggatggacactgcttgaaagaaatctaccttgtggatgtatctgagaagactgttgaggcctttgcagaagctgtgaaaactgtatttaaagccaccctgccagatacagctgccccgccaggtttaccaccagcagcagcggggcctgggaaaacatcatgggaaaaaggaagcctggtgtccccgggaggcctgcagatgctgttggtgaaagagggtgtgcagaatgctaagaccgatgttgttgtcaactccgttcccttggatctcgtgcttagtagagggcctctttctaagtccctcttggaaaaagctggaccagagctccaggaggaattggacacagttggacaaggggtggctgtcagcatgggcacagtgctcaaaaccagcagctggaatctggactgtcgctatgtgcttcacgtggtagctccggagtggagaaatggtagcacatcttcactcaagataatggaagacataatcagagaatgtatggagatcactgagagcttgtccttaaaatcaattgcatttccagcaataggaacaggaaacttgggatttcctaaaaacatattcgctgaattaatcatttcagaggtgttcaaatttagtagcaagaatcagctgaaaactttacaagaggttcactttctgctgcacccgagtgatcatgaaaatattcaggcattttcagatgaatttgccagaagggctaatggaaatctcgtcagtgacaaaattccgaaggctaaagatacacaaggtttttatgggactgtttctagccctgattcaggtgtgtatgaaatgaagattggctccatcatcttccaggtggcttctggagatatcacgaaagaagaggcagatgtgattgtaaattcaacatcaaactcattcaatctcaaagcaggggtctccaaagcaattttagaatgtgctggacaaaatgtagaaagggaatgttctcagcaagctcagcagcgcaaaaatgattatataatcaccggaggtggatttttgaggtgcaagaatatcattcatgtaattggtggaaatgatgtcaagagttcagtttcctctgttttgcaggagtgtgaaaaaaaaaattactcatccatttgcctcccagccattgggacaggaaatgccaaacaacacccagataaggttgctgaagccataattgatgccattgaagactttgtccagaaaggatcagcccagtctgtgaaaaaagttaaagttgttatctttctgcctcaagtactggatgtgttttatgccaacatgaagaaaagagaagggactcagctttcttcccaacagtctgtgatgtctaaacttgcatgtgagttctttgtttttatgaaatgcatgttcataacgttgatgtcacatgtgaaatacctaatcttccttttctttttagcatttttgggcttttcaaagcaatctccccaaaaaaagaatcatttggttttggaaaagaaaacagaatcagcaacttttcgggtgtgtggtgaaaatgtcacgtgtgtggaatacgctatctcctggctacaagacctgattgaaaaagaacagtgtccttacaccagtgaagatgagtgcatcaaagactttgatgaaaaggagtatcaggagttgaatgagctgcagaagaagttaaatattaacatttccctggaccataagagacctttgattaaggttttgggaattagcagagatgtgatgcaggctagagatgaaattgaggcgatgatcaagagagttcgattggccaaagaacaggaatcccgggcagattgtatcagtgagtttatagaatggcagtataatgacaataacacttctcattgttttaacaaaatgaccaatctgaaattagaggatgcaaggagagaaaagaaaaaaacagttgatgtcaaaattaatcatcggcactacacagtgaacttgaacacatacactgccacagacacaaagggccacagtttatctgttcagcgcctcacgaaatccaaagttgacatccctgcacactggagtgatatgaagcagcagaatttctgtgtggtggagctgctgcctagtgatcctgagtacaacacggtggcaagcaagtttaatcagacctgctcacacttcagaatagagaagattgagaggatccagaatccagatctctggaatagctaccaggcaaagaaaaaaactatggatgccaagaatggccagacaatgaatgagaagcaactcttccatgggacagatgccggctccgtgccacacgtcaatcgaaatggctttaaccgcagctatgccggaaagaatgctgtggcatatggaaagggaacctattttgctgtcaatgccaattattctgccaatgatacgtactccagaccagatgcaaatgggagaaagcatgtgtattatgtgcgagtacttactggaatctatacacatggaaatcattcattaattgtgcctccttcaaagaaccctcaaaatcctactgacctgtatgacactgtcacagataatgtgcaccatccaagtttatttgtggcattttatgactaccaagcatacccagagtaccttattacgtttagaaaataacactttggtatccttcccacaaaattattctccatttgtacatatctagttgtaaaacaagttttagcttttttttttaattcctcttaacagatttttctaatatccaaggatcattctttgtcgctgmagtcagtctttcttcagcttctctttcataatggaaatgaacttattatcttgagagcaaataacttggaaaatttaaatgagataatgcagttgcaactgtgtgtccacaagtatggacatcaaatctgtgggaaaagaacaggtttgtattttcaggaaggagagaataacagtcttatagacagagggcacagctaagcacagctgccactgcaggagacaggccccatgtcaggatgccatagtgctgtggggagcacagtattacccagtgggtagggcttctgtcttccctgggagcagggatggtatcttagtcaatttttttcccttgagatgaggtctgtgcctgatgtacaacggatactccataaatgtttgacaaaccaacgaagaatgaaaaaaagcctagtcagactcccatccaaagtaggaactatctctttaacattcttgactcactatcactttacctcaaattgaacagattccatgacggaacttcattcttcacaaactagccagtgacatgtgggacagctctggccagggctctgggactgcagtgtacttgcgctctgcacggtccaggagctgtgatgtggctgtggtctaggggaatcctgcctgccccatggagttgcgcagcacaaccctggctccaattgccagaaggctctttttaatgctgaaccaaaatgtgccttttttttttttttttgagatggagtttcactcttgttgcccaggctggagtgcaatggcgcgatctcagctcactgcagccactgcctcccaggttcaagtgattctcctgcctcagcctcccgagtagctgggattacaggcatgcgctaacacacccagctaattttgtatttttagtagagacgaggtttctccatgttcgacaggctggtctcgaactcccacctcagcctcccaaactgctgggattacaggtgtgagccaccgtgaccagccaatgtgccttcttatagtgtctactcattggtctttgttctgcccagtgataacaatgggataacgcctgctacacatcttcattgtgaaacccttcccctgtgctgagattaaatgaactctaagattattaaatagtatattttccttgacagcctagcgtttgatgattttaaagccttatgtataaataaaccaaaggaagtaagcagtcatattgctaatttgctaactcctatctattgaatggtgaagttttaaaaatttccccaggtaagtttaagattcaaacaccatctattgagcacctacattgtgtgccaggtagtaaaataggtgctttcatacacattgtctcaattcctgtgaggtcagaattatctctgcatttgaaacttgaggaaacatgctcagagtgcaagaagcttccttgcctgagatcacctagaaaggaaccctcagagccggcaactgaatcttggtccctgtgatgtcaagcccattgctctcccactgcagaacatggcctctagattaatgccaccgattcaggaacacctccgacagtcttgaaatacccccatgttgccttgtttgttttttccttctggcttcttctattacagtctcttcattggaagctctgtaggccaaggccagagctgatactgacacggagccaatgcagatagcacatcagatgctaggggtcgctgggaggattaagggacttaatctgctaggaacacctgtacttgaagtggaggaggctagggggccacagttgctgcttcattaacatagaggttttggatttttttctcttgtggtttgttttttaagtggattggcagactccttgttgcttaagagtggctttctaggcaggccactggcatctgaattcatcattgacaataaatgtaagaaattggaataaaaaagagagacctgctgttattcgcttttgttctccagtgatttgattaactcagggcaaggctgaatatcagagtgtatcgcactgaagaataataatccattcagtaatgttatagttatcctcaatctaaatatgtcaactgtcattttgctacttttcaaataaaatacttgaaaactgtcaaaaaaaaaaaa

SEQ ID NO: 55 - DNA, 7244 bp, Homo sapien
gtagaactccttgatttacaatgtatctaactaccaaagcttcattgtacatccctccagcacatccgcctctttcgaaggcgagtgtgaggtccgccaggatcccaggagcccatcccgcttcctggtgttcttctacccggaggacgttcggcagaaggttctggagagaaaaaatcatgagttggtatggcaaggaaaaggaacattcaagttaactgtccagttacctgcaaccccagatgaaatcgatcatgtctttgaagaggaacttctaacaaaagaatccaagaccaaagaagatgttaaagaaccagatgtgtcagaagaattggatacaaaactccctcttgatggtggattagacaaaatggaagatatcccagaggaatgtgaaaatatttcctctttggtggcatttgaaaacctcaaggcaaatgtgactgacataatgctaatcttgttagtggagaacataagtggcctgtctaatgatgactttcaagtggaaataataagagattttgatgttgctgttgttacctttcaaaagcacatagatactataagatttgttgatgattgtaccaagcaccattcaattaaacaacttcagctttctccaagacttctggaagtgacaaacacaatcagggttgaaaacctgccacctggtgctgatgactacagtttaaaacttttctttgaaaatccctataatggagggggaagagttgccaatgttgaatattttcctgaagagagttcagctctgattgaattttttgacagaaaagtgttagacaccatcatggccacaaaactcgacttcaataaaatgccactttctgtgttcccatactatgcctcattgggcacagccttgtatggaaaggagaagcctctgatcaagcttccagcaccatttgaagagtcactagatcttcccttatggaagttcttacagaaaaagaatcacctcattgaggagataaacgatgaaatgaggcgttgtcactgtgagctcacgtggtcccaactcagtggtaaagttaccatcagaccagcagccaccttagtcaatgaaggaagaccgagaatcaagacctggcaggcagatacttccacaacactctctagcatcaggtctaaatataaagtcaacccaattaaagtggatccaacaatgtgggacaccataaaaaatgatgtgaaagatgacaggattttgattgagtttgatacacttaaggagatggtaatcttagcagggaaatcagaggatgtccaaagcattgaggtacaagtcagggagttaatagaaagcactactcaaaaaattaaaagggaagagcaaagtttgaaggaaaaaatgatcatttctccaggcaggtattttcttttgtgtcacagcagtctactggaccatttactcacggagtgcccagagatagagatttgttacgatagagtcactcaacacttgtgcttgaaaggacctagtgcagatgtgtataaagcaaagtgtgaaatccaggaaaaggtgtacaccatggctcagaaaaacattcaggtttctcctgagatttttcagtttttgcaacaggtaaactggaaagaattctctaagtgtcttttcatagcacagaagattcttgcactttatgagctagagggtacaactgttctcttaaccagctgttcttctgaagccctgttagaagcagaaaagcaaatgctcagtgccttaaattataagcgcattgaagttgagaacaaagaagttcttcatggcaagaaatggaaagggctcactcacaatttgcttaagaaacaaaattcctccccaaacactgtaatcatcaatgagttaacttcagaaaccacagctgaagtcatcattacaggctgtgtaaaagaagtaaatgaaacctataaattgctttttaacttcgttgaacaaaacatgaaaatagagagactggttgaagtaaagccttccttagttattgactatttaaagacagaaaagaagctattctggccaaagataaagaaggtaaatgtgcaggtaagtttcaatcctgagaacaaacaaaaaggcattttactaactggctcaaagaccgaagtactgaaggcagtggacattgtcaagcaagtctgggattcagtctgtgttaaaagtgtccatactgataagccaggagccaagcagttcttccaggataaagcacggttttatcaaagtgagatcaaacggttgtttggttgttacattgaactacaggagaatgaagtaatgaaggagggaggcagccccgctgggcagaagtgcttctctcggacagtcttggcccctggcgttgtgctgattgtgcagcagggtgacttggcacggcttcctgtcgatgtggtggtgaatgcatctaatgaggaccttaagcattatggtggcctggccgctgcgctctcaaaagcagctggccctgagctccaggccgactgtgaccagatagtgaagagagagggcagactcctaccgggcaatgccaccatctccaaggcaggaaagctgccctaccaccacgtgatccatgcagtggggccccgctggagcggatatgaggccccgaggtgtgtgtacctattaaggagagctgtgcaactcagtctctgtctagccgaaaaatacaagtaccgatccatagccatcccagctattagttctggagtctttggctttcccttaggccgatgcgtggagaccattgtttctgccatcaaggaaaacttccaattcaagaaggatggacactgcttgaaagaaatctaccttgtggatgtatctgagaagactgttgaggcctttgcagatgctgttggtgaaagagggtgtgcagaatgctaagaccgatgttgttgtcaactccgttcccttggatctcgtgcttagtagagggcctctttctaagtccctcttggaaaaagctggaccagagctccaggaggaattggacacagttggacaaggggtggctgtcagcatgggcacagtgctcaaaaccagcagctggaatctggactgtcgctatgtgcttcacgtggtagctccggagtggagaaatggtagcacatcttcactcaagataatggaagacataatcagagaatgtatggagatcactgagagcttgtccttaaaatcaattgcatttccagcaataggaacaggaaacttgggatttcctaaaaacatattcgctgaattaatcatttcagaggtgttcaaatttagtagcaagaatcagctgaaaactttacaagaggttcactttctgctgcacccgagtgatcatgaaaatattcaggcattttcagatgaatttgccagaagggctaatggaaatctcgtcagtgacaaaattccgaaggctaaagatacacaaggtttttatgggactgtttctagccctgattcaggtgtgtatgaaatgaagattggctccatcatcttccaggtggcttctggagatatcacgaaagaagaggcagatgtgattgtaaattcaacatcaaactcattcaatctcaaagcaggggtctccaaagcaattttagaatgtgctggacaaaatgtagaaagggaatgttctcagcaagctcagcagcgcaaaaatgattatataatcaccggaggtggatttttgaggtgcaagaatatcattcatgtaattggtggaaatgatgtcaagagttcagtttcctctgttttgcaggagtgtgaaaaaaaaaattactcatccatttgcctcccagccattgggacaggaaatgccaaacaacacccagataaggttgctgaagccataattgatgccattgaagactttgtccagaaaggatcagcccagtctgtgaaaaaagttaaagttgttatctttctgcctcaagtactggatgtgttttatgccaacatgaagaaaagagaagggactcagctttcttcccaacagtctgtgatgtctaaacttgcatcatttttgggcttttcaaagcaatctccccaaaaaaagaatcatttggttttggaaaagaaaacagaatcagcaacttttcgggtgtgtggtgaaaatgtcacgtgtgtggaatacgctatctcctggctacaagacctgattgaaaaagaacagtgtccttacaccagtgaagatgagtgcatcaaagactttgatgaaaaggagtatcaggagttgaatgagctgcagaagaagttaaatattaacatttccctggaccataagagacctttgattaaggttttgggaattagcagagatgtgatgcaggctagagatgaaattgaggcgatgatcaagagagttcgattggccaaagaacaggaatcccgggcagattgtatcagtgagtttatagaatggcagtataatgacaataacacttctcattgttttaacaaaatgaccaatctgaaattagaggatgcaaggagagaaaagaaaaaaacagttgatgtcaaaattaatcatcggcactacacagtgaacttgaacacatacactgccacagacacaaagggccacagtttatctgttcagcgcctcacgaaatccaaagttgacatccctgcacactggagtgatatgaagcagcagaatttctgtgtggtggagctgctgcctagtgatcctgagtacaacacggtggcaagcaagtttaatcagacctgctcacacttcagaatagagaagattgagaggatccagaatccagatctctggaatagctaccaggcaaagaaaaaaactatggatgccaagaatggccagacaatgaatgagaagcaactcttccatgggacagatgccggctccgtgccacacgtcaatcgaaatggctttaaccgcagctatgccggaaagaatgctgtggcatatggaaagggaacctattttgctgtcaatgccaattattctgccaatgatacgtactccagaccagatgcaaatgggagaaagcatgtgtattatgtgcgagtacttactggaatctatacacatggaaatcattcattaattgtgcctccttcaaagaaccctcaaaatcctactgacctgtatgacactgtcacagataatgtgcaccatccaagtttatttgtggcattttatgactaccaagcatacccagagtaccttattacgtttagaaaataacactttggtatccttcccacaaaattattctccatttgtacatatctagttgtaaaacaagttttagcttttttttttaattcctcttaacagatttttctaatatccaaggatcattctttgtcgctgmagtcagtctttcttcagcttctctttcataatggaaatgaacttattatcttgagacagggatggtatcttagtcaatttttttcccttgagatgaggtctgtgcctgatgtacaacggatactccataaatgtttgacaaaccaacgaagaatgaaaaaaagcctagtcagactcccatccaaagtaggaactatctctttaacattcttgactcactatcactttacctcaaattgaacagattccatgacggaacttcattcttcacaaactagccagtgacatgtgggacagctctggccagggctctgggactgcagtgtacttgcgctctgcacggtccaggagctgtgatgtggctgtggtctaggggaatcctgcctgccccatggagttgcgcagcacaaccctggctccaattgccagaaggctctttttaatgctgaaccaaaatgtgccttttttttttttttttgagatggagtttcactcttgttgcccaggctggagtgcaatggcgcgatctcagctcactgcagccactgcctcccaggttcaagtgattctcctgcctcagcctcccgagtagctgggattacaggcatgcgctaacacacccagctaattttgtatttttagtagagacgaggtttctccatgttcgacaggctggtctcgaactcccacctcagcctcccaaactgctgggattacaggtgtgagccaccgtgaccagccaatgtgccttcttatagtgtctactcattggtctttgttctgcccagtgataacaatgggataacgcctgctacacatcttcattgtgaaacccttcccctgtgctgagattaaatgaactctaagattattaaatagtatattttccttgacagcctagcgtttgatgattttaaagccttatgtataaataaaccaaaggaagtaagcagtcatattgctaatttgctaactcctatctattgaatggtgaagttttaaaaatttccccaggtaagtttaagattcaaacaccatctattgagcacctacattgtgtgccaggtagtaaaataggtgctttcatacacattgtctcaattcctgtgaggtcagaattatctctgcatttgaaacttgaggaaacatgctcagagtgcaagaagcttccttgcctgagatcacctagaaaggaaccctcagagccggcaactgaatcttggtccctgtgatgtcaagcccattgctctcccactgcagaacatggcctctagattaatgccaccgattcaggaacacctccgacagtcttgaaatacccccatgttgccttgtttgttttttccttctggcttcttctattacagtctcttcattggaagctctgtaggccaaggccagagctgatactgacacggagccaatgcagatagcacatcagatgctaggggtcgctgggaggattaagggacttaatctgctaggaacacctgtacttgaagtggaggaggctagggggccacagttgctgcttcattaacatagaggttttggatttttttctcttgtggtttgttttttaagtggattggcagactccttgttgcttaagagtggctttctaggcaggccactggcatctgaattcatcattgacaataaatgtaagaaattggaataaaaaagagagacctgctgttattcgcttttgttctccagtgatttgattaactcagggcaaggctgaatatcagagtgtatcgcactgaagaataataatccattcagtaatgttatagttatcctcaatctaaatatgtcaactgtcattttgctacttttcaaataaaatacttgaaaactgtcaaaaaaaaaaaa

SEQ ID NO: 56 - DNA, 7423 bp, Homo sapien
gtagaactccttgatttacaatgtatctaactaccaaagcttcattgtacatccctccagcacatccgcctctttcgaaggcgagtgtgaggtccgccaggatcccaggagcccatcccgcttcctggtgttcttctacccggaggacgttcggcagaaggttctggagagaaaaaatcatgagttggtatggcaaggaaaaggaacattcaagttaactgtccagttacctgcaaccccagatgaaatcgatcatgtctttgaagaggaacttctaacaaaagaatccaagaccaaagaagatgttaaagaaccagatgtgtcagaagaattggatacaaaactccctcttgatggtggattagacaaaatggaagatatcccagaggaatgtgaaaatatttcctctttggtggcatttgaaaacctcaaggcaaatgtgactgacataatgctaatcttgttagtggagaacataagtggcctgtctaatgatgactttcaagtggaaataataagagattttgatgttgctgttgttacctttcaaaagcacatagatactataagatttgttgatgattgtaccaagcaccattcaattaaacaacttcagctttctccaagacttctggaagtgacaaacacaatcagggttgaaaacctgccacctggtgctgatgactacagtttaaaacttttctttgaaaatccctataatggagggggaagagttgccaatgttgaatattttcctgaagagagttcagctctgattgaattttttgacagaaaagtgttagacaccatcatggccacaaaactcgacttcaataaaatgccactttctgtgttcccatactatgcctcattgggcacagccttgtatggaaaggagaagcctctgatcaagcttccagcaccatttgaagagtcactagatcttcccttatggaagttcttacagaaaaagaatcacctcattgaggagataaacgatgaaatgaggcgttgtcactgtgagctcacgtggtcccaactcagtggtaaagttaccatcagaccagcagccaccttagtcaatgaaggaagaccgagaatcaagacctggcaggcagatacttccacaacactctctagcatcaggtctaaatataaagtcaacccaattaaagtggatccaacaatgtgggacaccataaaaaatgatgtgaaagatgacaggattttgattgagtttgatacacttaaggagatggtaatcttagcagggaaatcagaggatgtccaaagcattgaggtacaagtcagggagttaatagaaagcactactcaaaaaattaaaagggaagagcaaagtttgaaggaaaaaatgatcatttctccaggcaggtattttcttttgtgtcacagcagtctactggaccatttactcacggagtgcccagagatagagatttgttacgatagagtcactcaacacttgtgcttgaaaggacctagtgcagatgtgtataaagcaaagtgtgaaatccaggaaaaggtgtacaccatggctcagaaaaacattcaggtttctcctgagatttttcagtttttgcaacaggtaaactggaaagaattctctaagtgtcttttcatagcacagaagattcttgcactttatgagctagagggtacaactgttctcttaaccagctgttcttctgaagccctgttagaagcagaaaagcaaatgctcagtgccttaaattataagcgcattgaagttgagaacaaagaagttcttcatggcaagaaatggaaagggctcactcacaatttgcttaagaaacaaaattcctccccaaacactgtaatcatcaatgagttaacttcagaaaccacagctgaagtcatcattacaggctgtgtaaaagaagtaaatgaaacctataaattgctttttaacttcgttgaacaaaacatgaaaatagagagactggttgaagtaaagccttccttagttattgactatttaaagacagaaaagaagctattctggccaaagataaagaaggtaaatgtgcaggtaagtttcaatcctgagaacaaacaaaaaggcattttactaactggctcaaagaccgaagtactgaaggcagtggacattgtcaagcaagtctgggattcagtctgtgttaaaagtgtccatactgataagccaggagccaagcagttcttccaggataaagcacggttttatcaaagtgagatcaaacggttgtttggttgttacattgaactacaggagaatgaagtaatgaaggagggaggcagccccgctgggcagaagtgcttctctcggacagtcttggcccctggcgttgtgctgattgtgcagcagggtgacttggcacggcttcctgtcgatgtggtggtgaatgcatctaatgaggaccttaagcattatggtggcctggccgctgcgctctcaaaagcagctggccctgagctccaggccgactgtgaccagatagtgaagagagagggcagactcctaccgggcaatgccaccatctccaaggcaggaaagctgccctaccaccacgtgatccatgcagtggggccccgctggagcggatatgaggccccgaggtgtgtgtacctattaaggagagctgtgcaactcagtctctgtctagccgaaaaatacaagtaccgatccatagccatcccagctattagttctggagtctttggctttcccttaggccgatgcgtggagaccattgtttctgccatcaaggaaaacttccaattcaagaaggatggacactgcttgaaagaaatctaccttgtggatgtatctgagaagactgttgaggcctttgcagatgctgttggtgaaagagggtgtgcagaatgctaagaccgatgttgttgtcaactccgttcccttggatctcgtgcttagtagagggcctctttctaagtccctcttggaaaaagctggaccagagctccaggaggaattggacacagttggacaaggggtggctgtcagcatgggcacagtgctcaaaaccagcagctggaatctggactgtcgctatgtgcttcacgtggtagctccggagtggagaaatggtagcacatcttcactcaagataatggaagacataatcagagaatgtatggagatcactgagagcttgtccttaaaatcaattgcatttccagcaataggaacaggaaacttgggatttcctaaaaacatattcgctgaattaatcatttcagaggtgttcaaatttagtagcaagaatcagctgaaaactttacaagaggttcactttctgctgcacccgagtgatcatgaaaatattcaggcattttcagatgaatttgccagaagggctaatggaaatctcgtcagtgacaaaattccgaaggctaaagatacacaaggtttttatgggactgtttctagccctgattcaggtgtgtatgaaatgaagattggctccatcatcttccaggtggcttctggagatatcacgaaagaagaggcagatgtgattgtaaattcaacatcaaactcattcaatctcaaagcaggggtctccaaagcaattttagaatgtgctggacaaaatgtagaaagggaatgttctcagcaagctcagcagcgcaaaaatgattatataatcaccggaggtggatttttgaggtgcaagaatatcattcatgtaattggtggaaatgatgtcaagagttcagtttcctctgttttgcaggagtgtgaaaaaaaaaattactcatccatttgcctcccagccattgggacaggaaatgccaaacaacacccagataaggttgctgaagccataattgatgccattgaagactttgtccagaaaggatcagcccagtctgtgaaaaaagttaaagttgttatctttctgcctcaagtactggatgtgttttatgccaacatgaagaaaagagaagggactcagctttcttcccaacagtctgtgatgtctaaacttgcatcatttttgggcttttcaaagcaatctccccaaaaaaagaatcatttggttttggaaaagaaaacagaatcagcaacttttcgggtgtgtggtgaaaatgtcacgtgtgtggaatacgctatctcctggctacaagacctgattgaaaaagaacagtgtccttacaccagtgaagatgagtgcatcaaagactttgatgaaaaggagtatcaggagttgaatgagctgcagaagaagttaaatattaacatttccctggaccataagagacctttgattaaggttttgggaattagcagagatgtgatgcaggctagagatgaaattgaggcgatgatcaagagagttcgattggccaaagaacaggaatcccgggcagattgtatcagtgagtttatagaatggcagtataatgacaataacacttctcattgttttaacaaaatgaccaatctgaaattagaggatgcaaggagagaaaagaaaaaaacagttgatgtcaaaattaatcatcggcactacacagtgaacttgaacacatacactgccacagacacaaagggccacagtttatctgttcagcgcctcacgaaatccaaagttgacatccctgcacactggagtgatatgaagcagcagaatttctgtgtggtggagctgctgcctagtgatcctgagtacaacacggtggcaagcaagtttaatcagacctgctcacacttcagaatagagaagattgagaggatccagaatccagatctctggaatagctaccaggcaaagaaaaaaactatggatgccaagaatggccagacaatgaatgagaagcaactcttccatgggacagatgccggctccgtgccacacgtcaatcgaaatggctttaaccgcagctatgccggaaagaatgctgtggcatatggaaagggaacctattttgctgtcaatgccaattattctgccaatgatacgtactccagaccagatgcaaatgggagaaagcatgtgtattatgtgcgagtacttactggaatctatacacatggaaatcattcattaattgtgcctccttcaaagaaccctcaaaatcctactgacctgtatgacactgtcacagataatgtgcaccatccaagtttatttgtggcattttatgactaccaagcatacccagagtaccttattacgtttagaaaataacactttggtatccttcccacaaaattattctccatttgtacatatctagttgtaaaacaagttttagcttttttttttaattcctcttaacagatttttctaatatccaaggatcattctttgtcgctgmagtcagtctttcttcagcttctctttcataatggaaatgaacttattatcttgagagcaaataacttggaaaatttaaatgagataatgcagttgcaactgtgtgtccacaagtatggacatcaaatctgtgggaaaagaacaggtttgtattttcaggaaggagagaataacagtcttatagacagagggcacagctaagcacagctgccactgcaggagacaggccccatgtcaggatgccatagtgctgtggggagcacagtattacccagtgggtagggcttctgtcttccctgggagcagggatggtatcttagtcaatttttttcccttgagatgaggtctgtgcctgatgtacaacggatactccataaatgtttgacaaaccaacgaagaatgaaaaaaagcctagtcagactcccatccaaagtaggaactatctctttaacattcttgactcactatcactttacctcaaattgaacagattccatgacggaacttcattcttcacaaactagccagtgacatgtgggacagctctggccagggctctgggactgcagtgtacttgcgctctgcacggtccaggagctgtgatgtggctgtggtctaggggaatcctgcctgccccatggagttgcgcagcacaaccctggctccaattgccagaaggctctttttaatgctgaaccaaaatgtgccttttttttttttttttgagatggagtttcactcttgttgcccaggctggagtgcaatggcgcgatctcagctcactgcagccactgcctcccaggttcaagtgattctcctgcctcagcctcccgagtagctgggattacaggcatgcgctaacacacccagctaattttgtatttttagtagagacgaggtttctccatgttcgacaggctggtctcgaactcccacctcagcctcccaaactgctgggattacaggtgtgagccaccgtgaccagccaatgtgccttcttatagtgtctactcattggtctttgttctgcccagtgataacaatgggataacgcctgctacacatcttcattgtgaaacccttcccctgtgctgagattaaatgaactctaagattattaaatagtatattttccttgacagcctagcgtttgatgattttaaagccttatgtataaataaaccaaaggaagtaagcagtcatattgctaatttgctaactcctatctattgaatggtgaagttttaaaaatttccccaggtaagtttaagattcaaacaccatctattgagcacctacattgtgtgccaggtagtaaaataggtgctttcatacacattgtctcaattcctgtgaggtcagaattatctctgcatttgaaacttgaggaaacatgctcagagtgcaagaagcttccttgcctgagatcacctagaaaggaaccctcagagccggcaactgaatcttggtccctgtgatgtcaagcccattgctctcccactgcagaacatggcctctagattaatgccaccgattcaggaacacctccgacagtcttgaaatacccccatgttgccttgtttgttttttccttctggcttcttctattacagtctcttcattggaagctctgtaggccaaggccagagctgatactgacacggagccaatgcagatagcacatcagatgctagggggccacagttgctgcttcattaacatagaggttttggatttttttctcttgtggtttgttttttaagtggattggcagactccttgttgcttaagagtggctttctaggcaggccactggcatctgaattcatcattgacaataaatgtaagaaattggaataaaaaagagagacctgctgttattcgcttttgttctccagtgatttgattaactcagggcaaggctgaatatcagagtgtatcgcactgaagaataataatccattcagtaatgttatagttatcctcaatctaaatatgtcaactgtcattttgctacttttcaaataaaatacttgaaaactgtcaaaaaaaaaaaa

SEQ ID NO: 57 - DNA, 7622 bp, Homo sapien
gtagaactccttgatttacaatgtatctaactaccaaagcttcattgtacatccctccagcacatccgcctctttcgaaggcgagtgtgaggtccgccaggatcccaggagcccatcccgcttcctggtgttcttctacccggaggacgttcggcagaaggttctggagagaaaaaatcatgagttggtatggcaaggaaaaggaacattcaagttaactgtccagttacctgcaaccccagatgaaatcgatcatgtctttgaagaggaacttctaacaaaagaatccaagaccaaagaagatgttaaagaaccagatgtgtcagaagaattggatacaaaactccctcttgatggtggattagacaaaatggaagatatcccagaggaatgtgaaaatatttcctctttggtggcatttgaaaacctcaaggcaaatgtgactgacataatgctaatcttgttagtggagaacataagtggcctgtctaatgatgactttcaagtggaaataataagagattttgatgttgctgttgttacctttcaaaagcacatagatactataagatttgttgatgattgtaccaagcaccattcaattaaacaacttcagctttctccaagacttctggaagtgacaaacacaatcagggttgaaaacctgccacctggtgctgatgactacagtttaaaacttttctttgaaaatccctataatggagggggaagagttgccaatgttgaatattttcctgaagagagttcagctctgattgaattttttgacagaaaagtgttagacaccatcatggccacaaaactcgacttcaataaaatgccactttctgtgttcccatactatgcctcattgggcacagccttgtatggaaaggagaagcctctgatcaagcttccagcaccatttgaagagtcactagatcttcccttatggaagttcttacagaaaaagaatcacctcattgaggagataaacgatgaaatgaggcgttgtcactgtgagctcacgtggtcccaactcagtggtaaagttaccatcagaccagcagccaccttagtcaatgaaggaagaccgagaatcaagacctggcaggcagatacttccacaacactctctagcatcaggtctaaatataaagtcaacccaattaaagtggatccaacaatgtgggacaccataaaaaatgatgtgaaagatgacaggattttgattgagtttgatacacttaaggagatggtaatcttagcagggaaatcagaggatgtccaaagcattgaggtacaagtcagggagttaatagaaagcactactcaaaaaattaaaagggaagagcaaagtttgaaggaaaaaatgatcatttctccaggcaggtattttcttttgtgtcacagcagtctactggaccatttactcacggagtgcccagagatagagatttgttacgatagagtcactcaacacttgtgcttgaaaggacctagtgcagatgtgtataaagcaaagtgtgaaatccaggaaaaggtgtacaccatggctcagaaaaacattcaggtttctcctgagatttttcagtttttgcaacaggtaaactggaaagaattctctaagtgtcttttcatagcacagaagattcttgcactttatgagctagagggtacaactgttctcttaaccagctgttcttctgaagccctgttagaagcagaaaagcaaatgctcagtgccttaaattataagcgcattgaagttgagaacaaagaagttcttcatggcaagaaatggaaagggctcactcacaatttgcttaagaaacaaaattcctccccaaacactgtaatcatcaatgagttaacttcagaaaccacagctgaagtcatcattacaggctgtgtaaaagaagtaaatgaaacctataaattgctttttaacttcgttgaacaaaacatgaaaatagagagactggttgaagtaaagccttccttagttattgactatttaaagacagaaaagaagctattctggccaaagataaagaaggtaaatgtgcaggtaagtttcaatcctgagaacaaacaaaaaggcattttactaactggctcaaagaccgaagtactgaaggcagtggacattgtcaagcaagtctgggattcagtctgtgttaaaagtgtccatactgataagccaggagccaagcagttcttccaggataaagcacggttttatcaaagtgagatcaaacggttgtttggttgttacattgaactacaggagaatgaagtaatgaaggagggaggcagccccgctgggcagaagtgcttctctcggacagtcttggcccctggcgttgtgctgattgtgcagcagggtgacttggcacggcttcctgtcgatgtggtggtgaatgcatctaatgaggaccttaagcattatggtggcctggccgctgcgctctcaaaagcagctggccctgagctccaggccgactgtgaccagatagtgaagagagagggcagactcctaccgggcaatgccaccatctccaaggcaggaaagctgccctaccaccacgtgatccatgcagtggggccccgctggagcggatatgaggccccgaggtgtgtgtacctattaaggagagctgtgcaactcagtctctgtctagccgaaaaatacaagtaccgatccatagccatcccagctattagttctggagtctttggctttcccttaggccgatgcgtggagaccattgtttctgccatcaaggaaaacttccaattcaagaaggatggacactgcttgaaagaaatctaccttgtggatgtatctgagaagactgttgaggcctttgcagatgctgttggtgaaagagggtgtgcagaatgctaagaccgatgttgttgtcaactccgttcccttggatctcgtgcttagtagagggcctctttctaagtccctcttggaaaaagctggaccagagctccaggaggaattggacacagttggacaaggggtggctgtcagcatgggcacagtgctcaaaaccagcagctggaatctggactgtcgctatgtgcttcacgtggtagctccggagtggagaaatggtagcacatcttcactcaagataatggaagacataatcagagaatgtatggagatcactgagagcttgtccttaaaatcaattgcatttccagcaataggaacaggaaacttgggatttcctaaaaacatattcgctgaattaatcatttcagaggtgttcaaatttagtagcaagaatcagctgaaaactttacaagaggttcactttctgctgcacccgagtgatcatgaaaatattcaggcattttcagatgaatttgccagaagggctaatggaaatctcgtcagtgacaaaattccgaaggctaaagatacacaaggtttttatgggactgtttctagccctgattcaggtgtgtatgaaatgaagattggctccatcatcttccaggtggcttctggagatatcacgaaagaagaggcagatgtgattgtaaattcaacatcaaactcattcaatctcaaagcaggggtctccaaagcaattttagaatgtgctggacaaaatgtagaaagggaatgttctcagcaagctcagcagcgcaaaaatgattatataatcaccggaggtggatttttgaggtgcaagaatatcattcatgtaattggtggaaatgatgtcaagagttcagtttcctctgttttgcaggagtgtgaaaaaaaaaattactcatccatttgcctcccagccattgggacaggaaatgccaaacaacacccagataaggttgctgaagccataattgatgccattgaagactttgtccagaaaggatcagcccagtctgtgaaaaaagttaaagttgttatctttctgcctcaagtactggatgtgttttatgccaacatgaagaaaagagaagggactcagctttcttcccaacagtctgtgatgtctaaacttgcatcatttttgggcttttcaaagcaatctccccaaaaaaagaatcatttggttttggaaaagaaaacagaatcagcaacttttcgggtgtgtggtgaaaatgtcacgtgtgtggaatacgctatctcctggctacaagacctgattgaaaaagaacagtgtccttacaccagtgaagatgagtgcatcaaagactttgatgaaaaggagtatcaggagttgaatgagctgcagaagaagttaaatattaacatttccctggaccataagagacctttgattaaggttttgggaattagcagagatgtgatgcaggctagagatgaaattgaggcgatgatcaagagagttcgattggccaaagaacaggaatcccgggcagattgtatcagtgagtttatagaatggcagtataatgacaataacacttctcattgttttaacaaaatgaccaatctgaaattagaggatgcaaggagagaaaagaaaaaaacagttgatgtcaaaattaatcatcggcactacacagtgaacttgaacacatacactgccacagacacaaagggccacagtttatctgttcagcgcctcacgaaatccaaagttgacatccctgcacactggagtgatatgaagcagcagaatttctgtgtggtggagctgctgcctagtgatcctgagtacaacacggtggcaagcaagtttaatcagacctgctcacacttcagaatagagaagattgagaggatccagaatccagatctctggaatagctaccaggcaaagaaaaaaactatggatgccaagaatggccagacaatgaatgagaagcaactcttccatgggacagatgccggctccgtgccacacgtcaatcgaaatggctttaaccgcagctatgccggaaagaatgctgtggcatatggaaagggaacctattttgctgtcaatgccaattattctgccaatgatacgtactccagaccagatgcaaatgggagaaagcatgtgtattatgtgcgagtacttactggaatctatacacatggaaatcattcattaattgtgcctccttcaaagaaccctcaaaatcctactgacctgtatgacactgtcacagataatgtgcaccatccaagtttatttgtggcattttatgactaccaagcatacccagagtaccttattacgtttagaaaataacactttggtatccttcccacaaaattattctccatttgtacatatctagttgtaaaacaagttttagcttttttttttaattcctcttaacagatttttctaatatccaaggatcattctttgtcgctgmagtcagtctttcttcagcttctctttcataatggaaatgaacttattatcttgagagcaaataacttggaaaatttaaatgagataatgcagttgcaactgtgtgtccacaagtatggacatcaaatctgtgggaaaagaacaggtttgtattttcaggaaggagagaataacagtcttatagacagagggcacagctaagcacagctgccactgcaggagacaggccccatgtcaggatgccatagtgctgtggggagcacagtattacccagtgggtagggcttctgtcttccctgggagcagggatggtatcttagtcaatttttttcccttgagatgaggtctgtgcctgatgtacaacggatactccataaatgtttgacaaaccaacgaagaatgaaaaaaagcctagtcagactcccatccaaagtaggaactatctctttaacattcttgactcactatcactttacctcaaattgaacagattccatgacggaacttcattcttcacaaactagccagtgacatgtgggacagctctggccagggctctgggactgcagtgtacttgcgctctgcacggtccaggagctgtgatgtggctgtggtctaggggaatcctgcctgccccatggagttgcgcagcacaaccctggctccaattgccagaaggctctttttaatgctgaaccaaaatgtgccttttttttttttttttgagatggagtttcactcttgttgcccaggctggagtgcaatggcgcgatctcagctcactgcagccactgcctcccaggttcaagtgattctcctgcctcagcctcccgagtagctgggattacaggcatgcgctaacacacccagctaattttgtatttttagtagagacgaggtttctccatgttcgacaggctggtctcgaactcccacctcagcctcccaaactgctgggattacaggtgtgagccaccgtgaccagccaatgtgccttcttatagtgtctactcattggtctttgttctgcccagtgataacaatgggataacgcctgctacacatcttcattgtgaaacccttcccctgtgctgagattaaatgaactctaagattattaaatagtatattttccttgacagcctagcgtttgatgattttaaagccttatgtataaataaaccaaaggaagtaagcagtcatattgctaatttgctaactcctatctattgaatggtgaagttttaaaaatttccccaggtaagtttaagattcaaacaccatctattgagcacctacattgtgtgccaggtagtaaaataggtgctttcatacacattgtctcaattcctgtgaggtcagaattatctctgcatttgaaacttgaggaaacatgctcagagtgcaagaagcttccttgcctgagatcacctagaaaggaaccctcagagccggcaactgaatcttggtccctgtgatgtcaagcccattgctctcccactgcagaacatggcctctagattaatgccaccgattcaggaacacctccgacagtcttgaaatacccccatgttgccttgtttgttttttccttctggcttcttctattacagtctcttcattggaagctctgtaggccaaggccagagctgatactgacacggagccaatgcagatagcacatcagatgctaggggtcgctgggaggattaagtggattggcagactccttgttgcttaagagtggctttctaggcaggccactggcatctgaattcatcattgacaataaatgtaagaaattggaataaaaaagagagacctgctgttattcgcttttgttctccagtgatttgattaactcagggcaaggctgaatatcagagtgtatcgcactgaagaataataatccattcagtaatgttatagttatcctcaatctaaatatgtcaactgtcattttgctacttttcaaataaaatacttgagcaatggggggagaaagaggaatttatcttcttgacctctagtcccttgattgaaaatttaactctgatttaaggragccgttgggtaagccagattccacatcccactaaactgcctggaagaggtgggaggagagcagccattaaggtatgaggtacagagtcccatcaggtgagacccatgtctgtagccactgaggttcctgttgcaacaggtgagatgtgatcttcccaaagccgcagcttcttccgcaggaggctgagacag

SEQ ID NO: 58 - DNA, 7337 bp, Homo sapien
gtagaactccttgatttacaatgtatctaactaccaaagcttcattgtacatccctccagcacatccgcctctttcgaaggcgagtgtgaggtccgccaggatcccaggagcccatcccgcttcctggtgttcttctacccggaggacgttcggcagaaggttctggagagaaaaaatcatgagttggtatggcaaggaaaaggaacattcaagttaactgtccagttacctgcaaccccagatgaaatcgatcatgtctttgaagaggaacttctaacaaaagaatccaagaccaaagaagatgttaaagaaccagatgtgtcagaagaattggatacaaaactccctcttgatggtggattagacaaaatggaagatatcccagaggaatgtgaaaatatttcctctttggtggcatttgaaaacctcaaggcaaatgtgactgacataatgctaatcttgttagtggagaacataagtggcctgtctaatgatgactttcaagtggaaataataagagattttgatgttgctgttgttacctttcaaaagcacatagatactataagatttgttgatgattgtaccaagcaccattcaattaaacaacttcagctttctccaagacttctggaagtgacaaacacaatcagggttgaaaacctgccacctggtgctgatgactacagtttaaaacttttctttgaaaatccctataatggagggggaagagttgccaatgttgaatattttcctgaagagagttcagctctgattgaattttttgacagaaaagtgttagacaccatcatggccacaaaactcgacttcaataaaatgccactttctgtgttcccatactatgcctcattgggcacagccttgtatggaaaggagaagcctctgatcaagcttccagcaccatttgaagagtcactagatcttcccttatggaagttcttacagaaaaagaatcacctcattgaggagataaacgatgaaatgaggcgttgtcactgtgagctcacgtggtcccaactcagtggtaaagttaccatcagaccagcagccaccttagtcaatgaaggaagaccgagaatcaagacctggcaggcagatacttccacaacactctctagcatcaggtctaaatataaagtcaacccaattaaagtggatccaacaatgtgggacaccataaaaaatgatgtgaaagatgacaggattttgattgagtttgatacacttaaggagatggtaatcttagcagggaaatcagaggatgtccaaagcattgaggtacaagtcagggagttaatagaaagcactactcaaaaaattaaaagggaagagcaaagtttgaaggaaaaaatgatcatttctccaggcaggtattttcttttgtgtcacagcagtctactggaccatttactcacggagtgcccagagatagagatttgttacgatagagtcactcaacacttgtgcttgaaaggacctagtgcagatgtgtataaagcaaagtgtgaaatccaggaaaaggtgtacaccatggctcagaaaaacattcaggtttctcctgagatttttcagtttttgcaacaggtaaactggaaagaattctctaagtgtcttttcatagcacagaagattcttgcactttatgagctagagggtacaactgttctcttaaccagctgttcttctgaagccctgttagaagcagaaaagcaaatgctcagtgccttaaattataagcgcattgaagttgagaacaaagaagttcttcatggcaagaaatggaaagggctcactcacaatttgcttaagaaacaaaattcctccccaaacactgtaatcatcaatgagttaacttcagaaaccacagctgaagtcatcattacaggctgtgtaaaagaagtaaatgaaacctataaattgctttttaacttcgttgaacaaaacatgaaaatagagagactggttgaagtaaagccttccttagttattgactatttaaagacagaaaagaagctattctggccaaagataaagaaggtaaatgtgcaggtaagtttcaatcctgagaacaaacaaaaaggcattttactaactggctcaaagaccgaagtactgaaggcagtggacattgtcaagcaagtctgggattcagtctgtgttaaaagtgtccatactgataagccaggagccaagcagttcttccaggataaagcacggttttatcaaagtgagatcaaacggttgtttggttgttacattgaactacaggagaatgaagtaatgaaggagggaggcagccccgctgggcagaagtgcttctctcggacagtcttggcccctggcgttgtgctgattgtgcagcagggtgacttggcacggcttcctgtcgatgtggtggtgaatgcatctaatgaggaccttaagcattatggtggcctggccgctgcgctctcaaaagcagctggccctgagctccaggccgactgtgaccagatagtgaagagagagggcagactcctaccgggcaatgccaccatctccaaggcaggaaagctgccctaccaccacgtgatccatgcagtggggccccgctggagcggatatgaggccccgaggtgtgtgtacctattaaggagagctgtgcaactcagtctctgtctagccgaaaaatacaagtaccgatccatagccatcccagctattagttctggagtctttggctttcccttaggccgatgcgtggagaccattgtttctgccatcaaggaaaacttccaattcaagaaggatggacactgcttgaaagaaatctaccttgtggatgtatctgagaagactgttgaggcctttgcagatgctgttggtgaaagagggtgtgcagaatgctaagaccgatgttgttgtcaactccgttcccttggatctcgtgcttagtagagggcctctttctaagtccctcttggaaaaagctggaccagagctccaggaggaattggacacagttggacaaggggtggctgtcagcatgggcacagtgctcaaaaccagcagctggaatctggactgtcgctatgtgcttcacgtggtagctccggagtggagaaatggtagcacatcttcactcaagataatggaagacataatcagagaatgtatggagatcactgagagcttgtccttaaaatcaattgcatttccagcaataggaacaggaaacttgggatttcctaaaaacatattcgctgaattaatcatttcagaggtgttcaaatttagtagcaagaatcagctgaaaactttacaagaggttcactttctgctgcacccgagtgatcatgaaaatattcaggcattttcagatgaatttgccagaagggctaatggaaatctcgtcagtgacaaaattccgaaggctaaagatacacaaggtttttatgggactgtttctagccctgattcaggtgtgtatgaaatgaagattggctccatcatcttccaggtggcttctggagatatcacgaaagaagaggcagatgtgattgtaaattcaacatcaaactcattcaatctcaaagcaggggtctccaaagcaattttagaatgtgctggacaaaatgtagaaagggaatgttctcagcaagctcagcagcgcaaaaatgattatataatcaccggaggtggatttttgaggtgcaagaatatcattcatgtaattggtggaaatgatgtcaagagttcagtttcctctgttttgcaggagtgtgaaaaaaaaaattactcatccatttgcctcccagccattgggacaggaaatgccaaacaacacccagataaggttgctgaagccataattgatgccattgaagactttgtccagaaaggatcagcccagtctgtgaaaaaagttaaagttgttatctttctgcctcaagtactggatgtgttttatgccaacatgaagaaaagagaagggactcagctttcttcccaacagtctgtgatgtctaaacttgcatcatttttgggcttttcaaagcaatctccccaaaaaaagaatcatttggttttggaaaagaaaacagaatcagcaacttttcgggtgtgtggtgaaaatgtcacgtgtgtggaatacgctatctcctggctacaagacctgattgaaaaagaacagtgtccttacaccagtgaagatgagtgcatcaaagactttgatgaaaaggagtatcaggagttgaatgagctgcagaagaagttaaatattaacatttccctggaccataagagacctttgattaaggttttgggaattagcagagatgtgatgcaggctagagatgaaattgaggcgatgatcaagagagttcgattggccaaagaacaggaatcccgggcagattgtatcagtgagtttatagaatggcagtataatgacaataacacttctcattgttttaacaaaatgaccaatctgaaattagaggatgcaaggagagaaaagaaaaaaacagttgatgtcaaaattaatcatcggcactacacagtgaacttgaacacatacactgccacagacacaaagggccacagtttatctgttcagcgcctcacgaaatccaaagttgacatccctgcacactggagtgatatgaagcagcagaatttctgtgtggtggagctgctgcctagtgatcctgagtacaacacggtggcaagcaagtttaatcagacctgctcacacttcagaatagagaagattgagaggatccagaatccagatctctggaatagctaccaggcaaagaaaaaaactatggatgccaagaatggccagacaatgaatgagaagcaactcttccatgggacagatgccggctccgtgccacacgtcaatcgaaatggctttaaccgcagctatgccggaaagaatgctgtggcatatggaaagggaacctattttgctgtcaatgccaattattctgccaatgatacgtactccagaccagatgcaaatgggagaaagcatgtgtattatgtgcgagtacttactggaatctatacacatggaaatcattcattaattgtgcctccttcaaagaaccctcaaaatcctactgacctgtatgacactgtcacagataatgtgcaccatccaagtttatttgtggcattttatgactaccaagcatacccagagtaccttattacgtttagaaaataacactttggtatccttcccacaaaattattctccatttgtacatatctagttgtaaaacaagttttagcttttttttttaattcctcttaacagatttttctaatatccaaggatcattctttgtcgctgmagtcagtctttcttcagcttctctttcataatggaaatgaacttattatcttgagagcaaataacttggaaaatttaaatgagataatgcagttgcaactgtgtgtccacaagtatggacatcaaatctgtgggaaaagaacaggtttgtattttcaggaaggagagaataacagtcttatagacagagggcacagctaagcacagctgccactgcaggagacaggccccatgtcaggatgccatagtgctgtggggagcacagtattacccagtgggtagggcttctgtcttccctgggagcagggatggtatcttagtcaatttttttcccttgagatgaggtctgtgcctgatgtacaacggatactccataaatgtttgacaaaccaacgaagaatgaaaaaaagcctagtcagactcccatccaaagtaggaactatctctttaacattcttgactcactatcactttacctcaaattgaacagattccatgacggaacttcattcttcacaaactagccagtgacatgtgggacagctctggccagggctctgggactgcagtgtacttgcgctctgcacggtccaggagctgtgatgtggctgtggtctaggggaatcctgcctgccccatggagttgcgcagcacaaccctggctccaattgccagaaggctctttttaatgctgaaccaaaatgtgccttttttttttttttttgagatggagtttcactcttgttgcccaggctggagtgcaatggcgcgatctcagctcactgcagccactgcctcccaggttcaagtgattctcctgcctcagcctcccgagtagctgggattacaggcatgcgctaacacacccagctaattttgtatttttagtagagacgaggtttctccatgttcgacaggctggtctcgaactcccacctcagcctcccaaactgctgggattacaggtgtgagccaccgtgaccagccaatgtgccttcttatagtgtctactcattggtctttgttctgcccagtgataacaatgggataacgcctgctacacatcttcattgtgaaacccttcccctgtgctgagattaaatgaactctaagattattaaatagtatattttccttgacagcctagcgtttgatgattttaaagccttatgtataaataaaccaaaggaagtaagcagtcatattgctaatttgctaactcctatctattgaatggtgaagttttaaaaatttccccaggtaagtttaagattcaaacaccatctattgagcacctacattgtgtgccaggtagtaaaataggtgctttcatacacattgtctcaattcctgtgaggtcagaattatctctgcatttgaaacttgaggaaacatgctcagagtgcaagaagcttccttgcctgagatcacctagaaaggaaccctcagagccggcaactgaatcttggtccctgtgatgtcaagcccattgctctcccactgcagaacatggcctctagattaatgccaccgattcaggaacacctccgacagtcttgaaatacccccatgttgccttgtttgttttttccttctggcttcttctattacagtctcttcattggaagctctgtaggccaaggccagagctgatactgacacggagccaatgcagatagcacatcagatgctaggggtcgctgggaggattaagggacttaatctgctaggaacacctgtacttgaagtggaggaggctagggggccacagttgctgcttcattaacatagaggttttggatttttttctcttgtggtttgttttttaagtggattggcagactccttgttgcttaagagtggctttctaggcaggccactggcatctgaattcatcattgacaataaatgtaagaaattggaataaaaaagagaaccgtcgattcgagggartcctctggagtcgccgcg

SEQ ID NO: 59 - DNA, 1259 bp, Homo sapien
agggtggagtgcaggcttggaaagcaggagagctcagcctacgtctttaatcctcctgcccaccccttggattctgtctccactgggactcaagagatgcagaggttgaggtggctgcgggactggaagtcatcgggcagaggtctcacagcagccaaggaacctggggcccgctcctcccccctccaggccatgaggattctgcagttaatcctgcttgctctggcaacagggcttgtagggggagagaccaggatcatcaaggggttcgagtgcaagcctcactcccagccctggcaggcagccctgttcgagaagacgcggctactctgtggggcgacgctcatcgcccccagatggctcctgacagcagcccactgcctcaagccccgctacatagttcacctggggcagcacaacctccagaaggaggagggctgtgagcagacccggacagccactgagtccttcccccaccccggcttcaacaacagcctccccaacaaagaccaccgcaatgacatcatgctggtgaagatggcatcgccagtctccatcacctgggctgtgcgacccctcaccctctcctcacgctgtgtcactgctggcaccagctgcctcatttccggctggggcagcacgtccagcccccagttacgcctgcctcacaccttgcgatgcgccaacatcaccatcattgagcaccagaagtgtgagaacgcctaccccggcaacatcacagacaccatggtgtgtgccagcgtgcaggaagggggcaaggactcctgccagggtgactccgggggccctctggtctgtaaccagtctcttcaaggcattatctcctggggccaggatccgtgtgcgatcacccgaaagcctggtgtctacacgaaagtctgcaaatatgtggactggatccaggagacgatgaagaacaattagactggacccacccaccacagcccatcaccctccatttccacttggtgtttggttcctgttcactctgttaataagaaaccctaagccaagaccctctacgaacattctttgggcctcctggactacaggagatgctgtcacttaataatcaacctggggttcgaaatcagtgagacctggattcaaattctgccttgaaatattgtgactctgggaatgacaacacctggtttgttctctgttgtatccccagccccaaagacagctcctggccatatatcaaggtttcaataaatatttgctaaatgagtgaa

SEQ ID NO: 60 - DNA, 980 bp, Homo sapien
agaggttggaagcagagcgatgtttcttcatcctcaaaggtgtcactcacctctcccacccatgtctcccccgacctttcctcctccaactactgtctctcccacctcagccgctacatagttcacctggggcagcacaacctccagaaggaggagggctgtgagcagacccggacagccactgagtccttcccccaccccggcttcaacaacagcctccccaacaaagaccaccgcaatgacatcatgctggtgaagatggcatcgccagtctccatcacctgggctgtgcgacccctcaccctctcctcacgctgtgtcactgctggcaccagctgcctcatttccggctggggcagcacgtccagcccccagttacgcctgcctcacaccttgcgatgcgccaacatcaccatcattgagcaccagaagtgtgagaacgcctaccccggcaacatcacagacaccatggtgtgtgccagcgtgcaggaagggggcaaggactcctgccagggtgactccgggggccctctggtctgtaaccagtctcttcaaggcattatctcctggggccaggatccgtgtgcgatcacccgaaagcctggtgtctacacgaaagtctgcaaatatgtggactggatccaggagacgatgaagaacaattagactggacccacccaccacagcccatcaccctccatttccacttggtgtttggttcctgttcactctgttaataagaaaccctaagccaagaccctctacgaacattctttgggcctcctggactacaggagatgctgtcacttaataatcaacctggggttcgaaatcagtgagacctggattcaaattctgccttgaaatattgtgactctgggaatgacaacacctggtttgttctctgttgtatccccagccccaaagacagctcctggccatatatcaaggtttcaataaatatttgctaaatgagtgaa

SEQ ID NO: 61 - DNA, 420 bp, Homo sapien
gctcggtacccgtggacatttccacgagtcaccccgaaagcctggtgtctacacgaaagtctgcaaatatgtggactggatccaggagacgatgaagaacaattagactggacccacccaccacagcccatcaccctccatttccacttggtgtttggttcctgttcactctgttaataagaaaccctaagccaagaccctctacgaacattctttgggcctcctggactacaggagatgctgtcacttaataatcaacctggggttcgaaatcagtgagacctggattcaaattctgccttgaaatattgtgactctgggaatgacaacacctggtttgttctctgttgtatccccagccccaaagacagctcctggccatatatcaaggtttcaataaatatttgctaaatgagtgaa

SEQ ID NO: 62 - DNA, 587 bp, Homo sapien
ccggcccacaagagctacatcatcgctggtggtctgggtggcttcggccttggtctttctgtgcttggatttgcatatttattgcattgctggtagagacccccaggcctgtccaccctgccaagactcctcaggcagcgtgtgggtcccgcactctgcccccatttccccgatgtcccctgcgggcgcgggcagccacccaagcctgctggctgcggccccctctcggccaggcattggctcagcccgctgagtggggggtcgtgggccagtccccgaggagctgggcccctgcacaggcacacagggcccggccacacccagcggccccccgcacagccacccgtggggtgctgcccttatgcccggcgccgggcaccaactccatgtttggtgtttgtctgtgtttgtttttcaagaaatgattcaaattgctgcttggattttgaaatttactgtaactgtcagtgtacacgtctggaccccgtttcatttttacaccaatttggtaaaaatgctgctctcagcctcccacaattaaaccgcatgtgatctccaaaaaaaaaaaaagaaaaagaaaagaaaag

SEQ ID NO: 63 - DNA, 1940 bp, Homo sapien
atttttagatgtttgccgtggaagggtgagccagcatatggcgtcaaccgtattgttaaaaacataagtctctgatcactttttattgattgcaagcaacataaaagttgttgaatctcaaattgctccaaatgccactttttcagaacctactagacaagtggatctctccagtctccctccagagagtttacctaatatgaccacagaggaactgctcccgggtcactctgccggggcctaggacccatgcacagtgggtgccacagtgctgctcatgaggctgctgtcgcaggagtggggaaggaggaagacctgggcagaaaacagtgcccccagtgtgtgcccccctgcacctcccccgggtctggaaaagcttccttttagaggaagccaggaagtcaaatggcccacacaactcctctgcagagggaggcccgggacctccttttcattctctgttcatctttacacatttccattattttctctccattttcctcagaaatctctgcccctgttagaaaatcaaatcaaggagactcaccagagaataacagaggagctacaaaagtatggtgtcgacataccggaagacgaaaatgaaaaaatgttcttcctgatagataaaattaatgcctttaatcaggacatcactgctctcatgcaaggagaggaaactgtaggggaggaagacattcggctgtttaccagactccgacacgagttccacaaatggagtacaataattgaaaacaattttcaagaaggccataaaattttgagtagaaaaatccagaaatttgaaaatcagtatcgtggtagagagctgccaggctttgtgaattacaggacatttgagacaatcgtgaaacagcaaatcaaggcactggaagagccggctgtggatatgctacacaccgtgacggatatggtccggcttgctttcacagatgtttcgataaaaaattttgaagagttttttaacctccacagaaccgccaagtccaaaattgaagacattagagcagaacaagagagagaaggtgagaagctgatccgcctccacttccagatggaacagattgtctactgccaggaccaggtatacaggggtgcattgcagaaggtcagagagaaggagctggaagaagaaaagaagaagaaatcctgggattttggggctttccaatccagctcggcaacagactcttccatggaggagatctttcagcacctgatggcctatcaccaggaggccagcaagcgcatctccagccacatccctttgatcatccagttcttcatgctccagacgtacggccagcagcttcagaaggccatgctgcagctcctgcaggacaaggacacctacagctggctcctgaaggagcggagcgacaccagcgacaagcggaagttcctgaaggagcggcttgcacggctgacgcaggctcggcgccggcttgcccagttccccggttaaccacactctgtccagccccgtagacgtgcacgcacactgtctgcccccgttcccgggtagccactggactgacgacttgagtgctcagtagtcagactggatagtccgtctctgcttatccgttagccgtggtgatttagcaggaagctgtgagagcagtttggtttctagcatgaagacagagccccaccctcagatgcacatgagctggcgggattgaaggatgctgtcttcgtactgggaaagggattttcagccctcagaatcgctccaccttgcagctctccccttctctgtattcctagaaactgacacatgctgaacatcacagcttatttcctcatttttataatgtcccttcacaaacccagtgttttaggagcatgagtgccgtgtgtgtgcgtcctgtcggagccctgtctcctctctctgtaataaactcatttctagcaga

SEQ ID NO: 64 - DNA, 801 bp, Homo sapien
aaggagagtttgtatcataagtaggtgttggattatgtcatatgcgtatgtkctgcatckggtgamtgktcsccwatccccggattggcgaccatttcaaccaatttggacatcaggagaactgtcagaatgaggagatcctgaacagtctcaagtatgtccgtcctgggggtggataccagcccaccttcacccttgtccaaaaatgtgaggtgaatgggcagaacgagcatcctgtcttcgcctacctgaaggacaagctcccctacccttatgatgacccattttccctcatgaccgatcccaagctcatcatttggagccctgtgcgccgctcagatgtggcctggaactttgagaagttcctcatagggccggagggagagcccttccgacgctacagccgcaccttcccaaccatcaacattgagcctgacatcaagcgcctccttaaagttgccatatagatgtgaactgctcaacacacagatctcctactccatccagtcctgaggagccttaggatgcagcatgccttcaggagacactgctggacctcagcattcccttgatatcagtccccttcactgcagagccttgcctttcccctctgcctgtttccttttcctctcccaaccctctggttggtgattcaacttgggctccaagacttgggtaagctctgggccttcacagaatgatggcaccttcctaaaccctcatgggtggtgtctgagaggcgtgaagggcctggagccactctgctagaagagaccaataaagggcaggtgtggaaacggc

SEQ ID NO: 65 - DNA, 920 bp, Homo sapien
ccttgttcaaacagcacttacaggtggggacctgtttttgctaagtcatcctggggatgctcaaagctccattgttagatcctttctgtcctccttcctggctcctccttcctccccacccctctaataggctcataagtgggctcaggcctctctgcggggctcactctgcgcttcaccatggctttcattgccaagtccttctatgacctcagtgccatcagcctggatgggggagaactgtcagaatgaggagatcctgaacagtctcaagtatgtccgtcctgggggtggataccagcccaccttcacccttgtccaaaaatgtgaggtgaatgggcagaacgagcatcctgtcttcgcctacctgaaggacaagctcccctacccttatgatgacccattttccctcatgaccgatcccaagctcatcatttggagccctgtgcgccgctcagatgtggcctggaactttgagaagttcctcatagggccggagggagagcccttccgacgctacagccgcaccttcccaaccatcaacattgagcctgacatcaagcgcctccttaaagttgccatatagatgtgaactgctcaacacacagatctcctactccatccagtcctgaggagccttaggatgcagcatgccttcaggagacactgctggacctcagcattcccttgatatcagtccccttcactgcagagccttgcctttcccctctgcctgtttccttttcctctcccaaccctctggttggtgattcaacttgggctccaagacttgggtaagctctgggccttcacagaatgatggcaccttcctaaaccctcatgggtggtgtctgagaggcgtgaagggcctggagccactctgctagaagagaccaataaagggcaggtgtggaaacggc

SEQ ID NO: 66 - DNA, 922 bp, Homo sapien
gcatggtggcctgtgtctgtagtctcagctactaaagaggctgaagcaggaggaatgcttgagcccagaagttcaaggctgcagtgagcaacacctcgtctgtcttgtctctctctctttcacagtgaaaaagaatgaccctggggagggagtgtaggagggtgaaagagtttcatgttgtggatctttctcttcccccacccactgtccacgcactttgtctttttcctcccctaggagaactgtcagaatgaggagatcctgaacagtctcaagtatgtccgtcctgggggtggataccagcccaccttcacccttgtccaaaaatgtgaggtgaatgggcagaacgagcatcctgtcttcgcctacctgaaggacaagctcccctacccttatgatgacccattttccctcatgaccgatcccaagctcatcatttggagccctgtgcgccgctcagatgtggcctggaactttgagaagttcctcatagggccggagggagagcccttccgacgctacagccgcaccttcccaaccatcaacattgagcctgacatcaagcgcctccttaaagttgccatatagatgtgaactgctcaacacacagatctcctactccatccagtcctgaggagccttaggatgcagcatgccttcaggagacactgctggacctcagcattcccttgatatcagtccccttcactgcagagccttgcctttcccctctgcctgtttccttttcctctcccaaccctctggttggtgattcaacttgggctccaagacttgggtaagctctgggccttcacagaatgatggcaccttcctaaaccctcatgggtggtgtctgagaggcgtgaagggcctggagccactctgctagaagagaccaataaagggcaggtgtggaaacggc

SEQ ID NO: 67 - DNA, 1326 bp, Homo sapien
gaactctgggcgccggccccggaagtgcccgccgagctattttggttcaaggactcttccggtccctaaagcaagaaggaagaccgagaaaaggaagcggaggagaatcccggggcatacgcttgacacacacgcatacaaaaagagctttagtctcgaaagaggaattaccgaagtgtcgagagaggaattttaagaagtttacaactccgtcttcgccctaaacgcacgctgacccggaaagtaatctcctgaagctaggtcaaaggcgggggttctacggatgccggaaggagggtgcgcgcccatccttttagcaccgcgagaggcgccggtgtttcgagccgtggcaccggcatcggctgacactgctgcctccagctagttatttcgtcctcttccgttcttcacccctacaccttggaggtgaacttctcacctgagggctgtaaagactcgtttgaaaatggagagccaagaaccaacggaatcttctcagaatggcaaacagtatatcatttcagaggagttaatttcagaaggaaaatgggtcaagcttgaaaaaacaacgtacatggatcctactggtaaaactagaacttgggaatcagtgaaacgtacaaccaggaaagagcagactgcggatggtgtcgcggtcatccccgtgctgcagagaacacttcactatgagtgtatcgttctggtgaaacagttccgaccaccaatggggggctactgcatagagttccctgcaggtctcatagatgatggtgaaaccccagaagcagctgctctccgggagcttgaagaagaaactggctacaaaggggacattgccgaatgttctccagcggtctgtatggacccaggcttgtcaaactgtactatacacatcgtgacagtcaccattaacggagatgatgccgaaaacgcaaggccgaagccaaagccaggggatgggtgtgtgtcggctgtgatgaaggtggtgtggttgcattacgtgtcttggaacttgctgctagtttgatttattaaaagaatgtagtctttcatggaaagaatcggtctttcaaatagacttcatcagtattcttgtctctcttcctaatcatgtattttagcatttttcttttgccacttcattcatctttacgctttctttgtaaaaaaatgttaaatgacatattgccctgttttctatatgaagtgtattcccacttagtaatatgagctgcaggcttaagtagtaaacagtgagaaacttaaatcaccctggtttctgtcttcatgtatattttaagaatggcctaagttcccctgtagtcc

SEQ ID NO: 68 - DNA, 759 bp, Homo sapien
ggacgcgtgggtcgacccacgcgtcgcccacgcgtcgcccagttcgaggccgctgcgcggccctgcgcatgctgctggcagatcagggccagagctggaaggaggaggtggtgaccgtggagacgtggcaggagggctcactcaaagcctcctgcctatacgggcagctccccaagttccaggacggagacctcaccctgtaccagtccaataccatcctgcgtcacctgggccgcacccttgggctctatgggaaggaccagcaggaggcagccctggtggacatggtgaatgacggcgtggaggacctccgctgcaaatacatctccctcatctacaccaactatgaggcgggcaaggatgactatgtgaaggcactgcccgggcaactgaagccttttgagaccctgctgtcccagaaccagggaggcaagaccttcattgtgggagaccagatctccttcgctgactacaacctgctggacttgctgctgatccatgaggtcctagcccctggctgcctggatgcgttccccctgctctcagcatatgtggggcgcctcagtgcccggcccaagctcaaggccttcctggcctcccctgagtacgtgaacctccccatcaatggcaacgggaaacagtgagggttggggggactctgagcgggaggcagagtttgccttcctttctccaggaccaataaaatttctaagagagctaaaaaaaacaaaaagggggacggtataaaatccctcaggg

SEQ ID NO: 69 - DNA, 539 bp, Homo sapien
gcgatctagaaccggacgcgtgggcgccgcagtcttcgccaccatgccgccctacaccgtggtctatttcccagttcgaggccgctgcgcggccctgcgcatgctgctggcagatcagggccagagctggaaggaggaggtggtgaccgtggagacgtggcaggagggctcactcaaagcctcctgcctatacgggcagctccccaagttccaggacggagacctcaccctgtaccagtccaataccatcctgcgtcacctgggccgcacccttgggctctatgggaaggaccagcaggaggcagccctggtggacatggtgaatgacggcgtggaggacctccgctgcaaatacatctccctcatctacaccaactatgaggcgggcaaggatgactatgtgaaggcactgcccgggcaactgaagccttttgagaccctgctgtcccagaaccagggaggcaagaccttcattgtgggagaccagatctccttcgctgactacaaactccgaamtcggcggtaccgagctcgattta

SEQ ID NO: 70 - DNA, 1143 bp, Homo sapien
gcggccgccggggctggggccggcgggagtccgcgggaccctccagaagagcggccggcgccgtgactcagcactggggcggagcggggcgggaccacccttataaggctcggaggccgcgaggcttcgctggagtttcgccgccgcagtcttcgccaccacaaacttttctttgttcgccaccatgccgccctacaccgtggtctatttcccagttcgaggccgctgcgcggccctgcgcatgctgctggcagatcagggccagagctggaaggaggaggtggtgaccgtggagacgtggcaggagggctcactcaaagcctcctgcctatacgggcagctccccaagttccaggacggagacctcaccctgtaccagtccaataccatcctgcgtcacctgggccgcacccttgggctctatgggaaggaccagcaggaggcagccctggtggacatggtgaatgacggcgtggaggacctccgctgcaaatacatctccctcatctacaccaactatgaggcgggcaaggatgactatgtgaaggcactgcccgggcaactgaagccttttgagaccctgctgtcccagaaccagggaggcaagaccttcattgtgggagaccagatctccttcgctgactacaacctgctggacttgctgctgatccatgaggtcctagcccctggctgcctggatgcgttccccctgctctcagcatatgtggggcgcctcagtgcccggcccaagctcaaggccttcctggcctcccctgagtacgtgaacctccccatcaatggcaacgggaaacagtgagggttggggggactctgagcgggaggcagagtttgccttccagggaagcgaactcaacaatttcctacagaagcaacaccacagaagccgacacaactcgatacacacaccaagaccaccccgcggaggcgcccacgacatgtccgcgggcctcgcggcaacaacacgacggcccaccctgcacaggtcggccaccggcgggcccacacaaccgtcggaccccacaggaccgcccagaccatctccgtggctaccaccgagcgcggcggcacaacaccctggcggacgggacccccccctacatacggctacggctcgccatcaac

SEQ ID NO: 71 - DNA, 1019 bp, Homo sapien
ctgacccaggagtggccgctgggagggctggcaggatgtcccagggtccgggagtgccgacggggtctgggaggtacccctgggtgctgtgctggtactgcctggtgctggagctgttgctggcgctgggccgggccgttcttggtcccagtggctggctgggtagcggccccccttctggggagcacacctgtcttggagggtctgcagtgggacctttctcggccccatcgcaggtcgggttcgaggtcctgcccggggctgcctgcctccaggggccgcctgttctcactgggctccgcaggggggcaggtttccgactcccggggcttcttgtcttcgccaccatgccgccctacaccgtggtctatttcccagttcgaggccgctgcgcggccctgcgcatgctgctggcagatcagggccagagctggaaggaggaggtggtgaccgtggagacgtggcaggagggctcactcaaagcctcctgcctatacgggcagctccccaagttccaggacggagacctcaccctgtaccagtccaataccatcctgcgtcacctgggccgcacccttgggctctatgggaaggaccagcaggaggcagccctggtggacatggtgaatgacggcgtggaggacctccgctgcaaatacatctccctcatctacaccaactatgaggcgggcaaggatgactatgtgaaggcactgcccgggcaactgaagccttttgagaccctgctgtcccagaaccagggaggcaagaccttcattgtgggagaccagatctccttcgctgactacaacctgctggacttgctgctgatccatgaggtcctagcccctggctgcctggatgcgttccgcccaagctcaaggccttcctggcctcccctgagtacgtgaacctccccatcaatggcaacgggaaacagtgagggttggggggactctgagcgggaggcagagtttgccttcctttctccaggaccaataaaatttctaagagagcta

SEQ ID NO: 72 - DNA, 832 bp, Homo sapien
ctgacccaggagtggccgctgggagggctggcaggatgtcccagggtccgggagtgccgacggggtctgggaggtacccctgggtgctgtgctggtactgcctggtgctggagctgttgctggcgctgggccgggccgttcttggtcccagtggctggctgggtagcggccccccttctggggagcacacctgtcttggagggtctgcagtgggacctttctcggccccatcgcaggtcgggttcgaggtcctgcccggggctgcctgcctccaggggccgcctgttctcactgggctccgcaggggggcaggtttccgactcccggggcttcttgtcttcgccaccatgccgccctacaccgtggtctatttcccagttcgaggccgctgcgcggccctgcgcatgctgctggcagatcagggccagagctggaaggaggaggtggtgaccgtggagacgtggcaggagggctcactcaaagcctcctgcctatacgggcagctccccaagttccaggacggagacctcaccctgtaccagtccaataccatcctgcgtcacctgggccgcacccttgggctctatgggaaggaccagcaggaggcagccctggtggacatggtgaatgacggcgtggaggacctccgctgcaaatacatctccctcatctacaccaactatgcccaagctcaaggccttcctggcctcccctgagtacgtgaacctccccatcaatggcaacgggaaacagtgagggttggggggactctgagcgggaggcagagtttgccttcctttctccaggaccaataaaatttctaagagagcta

SEQ ID NO: 73 - DNA, 1059 bp, Homo sapien
  misc_feature (51)..(51): n=a, c, g or t
  misc_feature (67)..(67): n=a, c, g or t
  misc_feature (95)..(95): n=a, c, g or t
  misc_feature (101)..(101): n=a, c, g or t
  misc_feature (118)..(118): n=a, c, g or t
  misc_feature (123)..(123): n=a, c, g or t
  misc_feature (165)..(165): n=a, c, g or t
  misc_feature (194)..(194): n=a, c, g or t
  misc_feature (199)..(199): n=a, c, g or t
  misc_feature (249)..(249): n=a, c, g or t
  misc_feature (343)..(343): n=a, c, g or t
  misc_feature (352)..(352): n=a, c, g or t
  misc_feature (388)..(388): n=a, c, g or t
  misc_feature (420)..(420): n=a, c, g or t
  misc_feature (458)..(458): n=a, c, g or t
  misc_feature (488)..(488): n=a, c, g or t
  misc_feature (525)..(525): n=a, c, g or t
  misc_feature (533)..(533): n=a, c, g or t
  misc_feature (535)..(535): n=a, c, g or t
  misc_feature (538)..(538): n=a, c, g or t
ttgccggcttgccgggcagggggggaggccaggccaaagtgaacaagacancccgaggaggctgttnccatgcccctggggggctgattgcccanagtgtngagtcggcccccagatncagcncaggcccggccctgctccccaggcagcccctaaaggattctnctcagggaggcacaggccaggctggatgnagacnttcccaaaacctgacaagatgtgcaggccgaggccggggcctgggggctncctttgctcccagcccaggcaatggatgtgccagaaaggaatattgcaggcacttaaacgggctcccagggatttttaaacaaaaagcaaaganctgttgctncaaatctattgcagaccaagcaagcaggtttttatnaattttttttattagctgattgttgttatttnttatatgcaggcctgagtctgcctgtgcgccacatgcncaggcttcagccgctgtaatggttcgcatngcctgatgggtggagagctaagcgcgctgtcgagagnacttgcgngngcntcacccagctaatctgtagggctggacctatgtcctaaggacacactaatcgaactatgaactacaaagcgtctatcccaggaggtggctatggccacccgttctgctggcctggatctccccactttaggggtcaggctccattaggatttgccccttcccatctyttcctacccaaccactcaaattaatctttytttacctgagaccagttgggagccctggagtgcagggaggaaaggggaagggccagtttgggctgccgggttttagtttcctttgcactgagggcccccctattaccatgaaaaaagggcctgtgggagcctgcaaactccctgctcaaaaaaacatggagactcctgccctgttgtgtataratgcaagatatttatawatatttttggttgtcaatattwaatacmgmccctaagttatagtatatttgggcaagccmacttgtwaataccccccctcmctcctgttwcttwcctaaacaratataaatggstggtttttta

SEQ ID NO: 74 - DNA, 917 bp, Homo sapien
  misc_feature (23)..(23): n=a, c, g or t
  misc_feature (61)..(62): n=a, c, g or t
  misc_feature (70)..(70): n=a, c, g or t
  misc_feature (83)..(83): n=a, c, g or t
  misc_feature (93)..(93): n=a, c, g or t
  misc_feature (106)..(106): n=a, c, g or t
  misc_feature (128)..(129): n=a, c, g or t
  misc_feature (131)..(131): n=a, c, g or t
  misc_feature (135)..(135): n=a, c, g or t
  misc_feature (173)..(173): n=a, c, g or t
  misc_feature (180)..(180): n=a, c, g or t
  misc_feature (344)..(344): n=a, c, g or t
  misc_feature (358)..(358): n=a, c, g or t
  misc_feature (361)..(361): n=a, c, g or t
  misc_feature (363)..(363): n=a, c, g or t
  misc_feature (365)..(365): n=a, c, g or t
  misc_feature (370)..(370): n=a, c, g or t
  misc_feature (372)..(373): n=a, c, g or t
  misc_feature (378)..(378): n=a, c, g or t
  misc_feature (383)..(383): n=a, c, g or t
  misc_feature (416)..(416): n=a, c, g or t
  misc_feature (447)..(447): n=a, c, g or t
  misc_feature (464)..(464): n=a, c, g or t
  misc_feature (467)..(468): n=a, c, g or t
  misc_feature (471)..(471): n=a, c, g or t
  misc_feature (473)..(473): n=a, c, g or t
  misc_feature (486)..(486): n=a, c, g or t
  misc_feature (490)..(490): n=a, c, g or t
  misc_feature (492)..(492): n=a, c, g or t
  misc_feature (495)..(495): n=a, c, g or t
  misc_feature (497)..(497): n=a, c, g or t
  misc_feature (500)..(500): n=a, c, g or t
  misc_feature (504)..(505): n=a, c, g or t
  misc_feature (512)..(512): n=a, c, g or t
  misc_feature (515)..(515): n=a, c, g or t
  misc_feature (537)..(537): n=a, c, g or t
  misc_feature (542)..(542): n=a, c, g or t
  misc_feature (550)..(550): n=a, c, g or t
  misc_feature (562)..(562): n=a, c, g or t
  misc_feature (566)..(566): n=a, c, g or t
  misc_feature (570)..(570): n=a, c, g or t
  misc_feature (572)..(572): n=a, c, g or t
agactcgccagccagatgccaangatggggattcatacgacccctatgacttcagtgacanngaggaggnaaatgcctcaagnacacactccnaaagacggcagantcacaggagaccaaggaatccnngnaagnggagttgagtgaatccaggttgaaggcattcaaggtgnccctctnggatgtgttccgggaagctcatgcgcagtcaatcggcatgaatcgcctcacagaatccatcaaccgggacagcgaagagcccttctcttcagttgagatccaggctgctctgagcaagatgcaggatgacaatcaggtcatggtgtctgagggcatcatctggngggtggggggaggngtngngngtggngnngggtngtgcngagagagtttgttctgtgtttcccacgcctctncgtgacccaagtctttgcctcgactcccttnacagtgttgaattcaantgnnggngnggaatgttggtgntgangntgngntcngganncggtggnccntttgggaatgggtcatgaaggntgccntggggtgnggaaaggggggncagngggngnggacaatgactattgcatcttcattgcaaaagcactggctcatccgccctacttcccatcccacacaaacccaattgtaaataacatatgacttctgagtacttttgggggcacaactgttttctgttgctgtttttttgttttgttttttttctccagagcactttggtctagactaggctttgggtggttccaattggtggagagaagctctgaggcacgtcatgcaggtcaagaaagctttctttgcagtagcaccagttaaggtgaatatgtattgtatcacaaaacaaacccaatatccagatgratatccgagatgttgaataaacttagccatttcgt

SEQ ID NO: 75 - DNA, 912 bp, Homo sapien
aaacattcttgagctagtttagtcacttcaagtaattacatatccagaaaactagaggaggaggcagagcacagcatcgtcgggaccagactcgtctcaggccagttgcagccttctcagccaaacgccgaccaaggaaaactcactaccatgagaattgcagtgatttgcttttgcctcctaggcatcacctgtgccataccagttaaacaggctgattctggaagttctgaggaaaagcagctttacaacaaatacccagatgctgtggccacatggctaaaccctgacccatctcagaagcagaatctcctagccccacagaatgctgtgtcctctgaagaaaccaatgactttaaacaagagacccttccaagtaagtccaacgaaagccatgaccacatggatgatatggatgatgaagatgatgatgaccatgtggacagccaggactccattgactcgaacgactctgatgatgtagatgacactgatgattctcaccagtctgatgagtctcaccattctgatgaatctgatgaactggtcactgattttcccacggacctgccagcaaccgaagttttcactccagttgtccccacagtagacacatatgatggccgaggtgatagtgtggttatggactgaggtcaaaatctaagaagttgcgcagacctgaatacagtaccctgatgctacagacgaggacatcactcacaatggaaagcgaggagttgacatggtgcatacaagggcaccacgtggccagaccgacacggcgccgagggccgcggggcacgccaacaccaagagcagcgcagaccaacccaaccgggacagacacaaaacggcagacgaaaaagagcccgaagacgaaacacagcgcagcgcaacagaagggcacaaaag

SEQ ID NO: 76 - DNA, 870 bp, Homo sapien
aaacattcttgagctagtttagtcacttcaagtaattacatatccagaaaactagaggaggaggcagagcacagcatcgtcgggaccagactcgtctcaggccagttgcagccttctcagccaaacgccgaccaaggaaaactcactaccatgagaattgcagtgatttgcttttgcctcctaggcatcacctgtgccataccagttaaacaggctgattctggaagttctgaggaaaagcagctttacaacaaatacccagatgctgtggccacatggctaaaccctgacccatctcagaagcagaatctcctagccccacagacccttccaagtaagtccaacgaaagccatgaccacatggatgatatggatgatgaagatgatgatgaccatgtggacagccaggactccattgactcgaacgactctgatgatgtagatgacactgatgattctcaccagtctgatgagtctcaccattctgatgaatctgatgaactggtcactgattttcccacggacctgccagcaaccgaagttttcactccagttgtccccacagtagacacatatgatggccgaggtgatagtgtggttatggactgaggtcaaaatctaagaagttgcgcagacctgaatacagtaccctgatgctacagacgaggacatcactcacaatggaaagcgaggagttgacatggtgcatacaagggcaccacgtggccagaccgacacggcgccgagggccgcggggcacgccaacaccaagagcagcgcagaccaacccaaccgggacagacacaaaacggcagacgaaaaagagcccgaagacgaaacacagcgcagcgcaacagaagggcacaaaag

SEQ ID NO: 77 - DNA, 859 bp, Homo sapien
aaacattcttgagctagtttagtcacttcaagtaattacatatccagaaaactagaggaggaggcagagcacagcatcgtcgggaccagactcgtctcaggccagttgcagccttctcagccaaacgccgaccaaggaaaactcactaccatgagaattgcagtgatttgcttttgcctcctaggcatcacctgtgccataccagttaaacaggctgattctggaagttctgagggacccatctcagaagcagaatctcctagccccacagaatgctgtgtcctctgaagaaaccaatgactttaaacaagagacccttccaagtaagtccaacgaaagccatgaccacatggatgatatggatgatgaagatgatgatgaccatgtggacagccaggactccattgactcgaacgactctgatgatgtagatgacactgatgattctcaccagtctgatgagtctcaccattctgatgaatctgatgaactggtcactgattttcccacggacctgccagcaaccgaagttttcactccagttgtccccacagtagacacatatgatggccgaggtgatagtgtggttatggactgaggtcaaaatctaagaagttgcgcagacctgaatacagtaccctgatgctacagacgaggacatcactcacaatggaaagcgaggagttgacatggtgcatacaagggcaccacgtggccagaccgacacggcgccgagggccgcggggcacgccaacaccaagagcagcgcagaccaacccaaccgggacagacacaaaacggcagacgaaaaagagcccgaagacgaaacacagcgcagcgcaacagaagggcacaaaag

SEQ ID NO: 78 - DNA, 1125 bp, Homo sapien
ggagggctaggcccgtgcccccgcttgccaccggatggtcactccaccatccccaccaaagagcccaccctgcatgcaagggattgaagggtcctgccggtgagaccctgtccggcccagtgccatctgccccccgaggctgctagatgtcggtgtaggcatgtcccacccacccgccgcctcccacggacctcggggacaccagagctgccgacttggagactcctggtctgtgaagagccggtggtgcccgtgcccgcaggaactgggctgggcctcgtgcgccctggggtctgcgcttggtctttctgtgcttggatttgcatatttattgcattgctggtagagacccccaggcctgtccaccctgccaagactcctcaggcagcgtgtgggtcccgcactctgcccccatttccccgatgtcccctgcgggcgcgggcagccacccaagcctgctggctgcggccccctctcggccaggcattggctcagcccgctgagtggggggtcgtgggccagtccccgaggagctgggcccctgcacaggcacacagggcccggccacacccagcggccccccgcacagccacccgtggggtgctgcccttatgcccggcgccgggcaccaactccatgtttggtgtttgtctgtgtttgtttttcaagaaatgattcaaattgctgcttggattttgaaatttactgtaactgtcagtgtacacgtctggaccccgtttcatttttacaccaatttggtaaaaatgctgctctcagcctcccacaattaaaccgcatgtgatctccaaagaaaaacaaaaaacaacaaccaacacaacaaaaaaaccaagaaaacccgcgcaccgccagaaaaccaggcagacccaagaaacacagggcgcaccgcgccgctgcagcaacgaacaaggaccgtagtgccgcaccgagcacgaaccaacgacgggagaacagggccaccacacaagacacaagcgacgacaaccacaaccgcaccagcggcaggggatgagacaccacgcgcaacgaacaggacaagataggcacgaaagcaacaagtcacagaaacacgaggggaggggcccagccagcgacaaacaacagccg

SEQ ID NO: 79 - DNA, 2291 bp, Homo sapien
gacctaggcaggaagtcggcgcgggcggcgcggacagtatctgtgggtacccggagcacggagatctcgccggctttacgttcacctcggtgtctgcagcaccctccgcttcctctcctaggcgacgagacccagtggctagaagttcaccatgtctattctcaagatccatgccagggagatctttgactctcgcgggaatcccactgttgaggttgatctcttcacctcaaaaggtctcttcagagctgctgtgcccagtggtgcttcaactggtatctatgaggccctagagctccgggacaatgataagactcgctatatggggaagggtgtctcaaaggctgttgagcacatcaataaaactattgcgcctgccctggttagcaagaaactgaacgtcacagaacaagagaagattgacaaactgatgatcgagatggatggaacagaaaataaatctaagtttggtgcgaacgccattctgggggtgtcccttgccgtctgcaaagctggtgccgttgagaagggggtccccctgtaccgccacatcgctgacttggctggcaactctgaagtcatcctgccagtcccggcgttcaatgtcatcaatggcggttctcatgctggcaacaagctggccatgcaggagttcatgatcctcccagtcggtgcagcaaacttcagggaagccatgcgcattggagcagaggtttaccacaacctgaagaatgtcatcaaggagaaatatgggaaagatgccaccaatgtgggggatgaaggcgggtttgctcccaacatcctggagaataaagaaggcctggagctgctgaagactgctattgggaaagctggctacactgataaggtggtcatcggcatggacgtagcggcctccgagttcttcaggtctgggaagtatgacctggacttcaagtctcccgatgaccccagcaggtacatctcgcctgaccagctggctgacctgtacaagtccttcatcaaggactacccagtggtgtctatcgaagatccctttgaccaggatgactggggagcttggcagaagttcacagccagtgcaggaatccaggtagtgggggatgatctcacagtgaccaacccaaagaggatcgccaaggcccgtgaacgagaagtcctgcaactgcctcctgctcaaagtcaaccagattggctccgtgaccgagtctcttcaggcgtgcaagctggcccaggccaatggttggggcgtcatggtgtctcatcgttcgggggagactgaagataccttcatcgctgacctggttgtggggctgtgcactgggcagatcaagactggtgccccttgccgatctgagcgcttggccaagtacaaccagctcctcagaattgaagaggagctgggcagcaaggctaagtttgccggcaggaacttcagaaaccccttggccaagtaagctgtgggcaggcaagcccttcggtcacctgttggctacacagaccccctccccctcgtgtcagctcaggcagctcgaggcccccgaccaacacttgcaggggtccctgctagttagcgccccacccgccgtggagttcgtaccgcttccttagaacttctacagaagccaagctccctggagccctgttggcagctctagctttgcagtcgtgtaattggcccaagtcattgtttttctcgcctcactttccaccaagtgtctagagtcatgtgagcctcgtgtcatttccggggtggccacaggctagatccccggtggttttgtgctcaaaataaaaagcctcagtgacccctggaaaaaaaaaaaaaaaaaaaaaaaaaaaagagagccacaaaaaaaacaaaaaaaaaccaaaaacaacaatgtgtgtgggcgcggcgcatcggcgcccttgagagagaaggttttagaaaccacccgtggtgggggcgcgcgcggcggccccgaagcgatgagaggcaacacggggacaaaaagaggggtcccaagaggaaccactcgggggcaagagacaaaaagggggggggctccccacaataaaaacaccgcgccgggggaggggaccacgagggcgctcctcggagagcacactcccaagagaggacacaagagggggaacgcacaacaaaggggaggttaaaaacacaggaggggcgcacaacgaggaggcgcgaagatcacaaaaaaacaccccccctcaggcgtggtgggggggaacaacaaagaaaagaaaaaaaaaagacaaaacagagaaacaaagaaacagagaac

SEQ ID NO: 80 - DNA, 1459 bp, Homo sapien
gacctaggcaggaagtcggcgcgggcggcgcggacagtatctgtgggtacccggagcacggagatctcgccggctttacgttcacctcggtgtctgcagcaccctccgcttcctctcctaggcgacgagacccagtggctagaagttcaccatgtctattctcaagatccatgccagggagatctttgactctcgcgggaatcccactgttgaggttgatctcttcacctcaaaaggtctcttcagagctgctgtgcccagtggtgcttcaactggtatctatgaggccctagagctccgggacaatgataagactcgctatatggggaagggtgtctcaaaggctgttgagcacatcaataaaactattgcgcctgccctggttagcaagaaactgaacgtcacagaacaagagaagattgacaaactgatgatcgagatggatggaacagaaaataaatctaagtttggtgcgaacgccattctgggggtgtcccttgccgtctgcaaagctggtgccgttgagaagggggtccccctgtaccgccacatcgctgacttggctggcaactctgaagtcatcctgccagtcccggcgttcaatgtcatcaatggcggttctcatgctggcaacaagctggccatgcaggagttcatgatcctcccagtcggtgcagcaaacttcagggaagccatgcgcattggagcagaggtttaccacaacctgaagaatgtcatcaaggagaaatatgggaaagatgccaccaatgtgggggatgaaggcgggtttgctcccaacatcctggagaataaagaaggcctggagctgctgaagactgctattgggaaagctggctacactgataaggtggtcatcggcatggacgtagcggcctccgagttcttcaggtctgggaagtatgacctggacttcaagtctcccgatgaccccagcaggtacatctcgcctgaccagctggctgacctgtacaagtccttcatcaaggactacccagtggtgtctatcgaagatccctttgaccaggatgactggggagcttggcagaagttcacagccagtgcaggaatccaggtagtgggggatgatctcacagtgaccaacccaaagaggatcgccaaggcccgtgaacgagaagtcctgcaactgcctcctgctcaaagtcaaccagattggctccgtgaccagctggctgacctgtacaagtccttcatcaaggactacccagtggtgtctatcgaagatccctttgagctccctggagccctgttggcagctctagctttgcagtcgtgtaattggcccaagtcattgtttttctcgcctcactttccaccaagtgtctagagtcatgtgagcctcgtgtcatttccggggtggccacaggctagatccccggtggttttgtgctcaaaataaaaagcctcagtgacccctgga

SEQ ID NO: 81 - DNA, 1370 bp, Homo sapien
aaaaaaaaaaaaactcatctttggaggacaaaaggctttccatatgttagaaaaatttgaatctcatagtgagaccctttggttagctttccacgccaagtggccgttccaggcaggcagtgtcgtcttggttcagccaaggtcacagagggagtgatagcttccgcgcagccctggctacggactctgggcatctttccactgccccgcttgcgccacctgttaggcaggatcgtttttcctctggggcaagatcaaaatccaggtcctgcaggaagaaactcctcttaaaaatagtagggaagagtctccctggaactgttttctcctttcaggatgagggggatcgagcaagccactgtaacccctggcttggcttcctcttactatgagattgctcgtgggcccttagaagttccaggtcttcagccctaatctgccttttttttgggattcctagattaagcctgatcaagatgacaacctcccaaaagcaccgagacttcgtggcagagcccatgggggagaagccagtggggagcctggctgggattggtgaagtcctgggcaagaagctggaggaaaggggttttgacaaggtgtggggtggctgcgtgtacctagtgcaagcggcgggtggaagggaagtgattccatctgctgggggatggacagtaaggtataatctgaagaggctgccagagcctgggcacctggtggagaggagaggggggcaaaacccgcgctgcttcctgggcttgtgtgctctgaatggcacaggaatggctgtcttgctcttatctctcactgagcactgagcagcacgctccttccttttccctgttttgcaggcctatgttgtccttggccagtttctggtgctaaagaaagatgaagacctcttccgggaatggctgaaagacacttgtggcgccaacgccaagcagtcccgggactgcttcggatgccttcgagagtggtgcgacgccttcttgtgatgctctctgggaagctctcaatccccagccctcatccagagtttgcagccgagtagggactcctcccctgtcctctacgaaggaaaagattgctattgtcgtactcacctccgacgtactccggggtcttttgggagttttctcccctaaccatttcaacttttttttggattctcgctcttgcatgcctcccccgtcctttttcccttgccagttccctggtgacagttaccagctttcctgaatggattcccggccccatccctcacccccaccctcactttcaatccgtttgataccatttggctccttttttggcagaacagtcactgtccttgtaaagttttttagatcaataaagtcagtggcttt

SEQ ID NO: 82 - DNA, 350 bp, Homo sapien
ggacgcgtgggtcgacggacgcgtgggtcgacccacgcgtccgccagatgaccgacctggtcactcctcctgccaacattcagtctggtatgtgaggcgtgcgtgaagcaagaactcctggagctacagggacagggagccatcattcctgcctgggaatcctggaagacttcctgcaggagtcagcgttcaatcttgaccttgaagatgggaaggatgttctttttacgtaccaattcttttgtcttttgatattaaaaagaagtacatgttcattgtagagaatttggaaactgtagaagagaatcaagaagaaaaataaaaatcagctgttgtaatcacctagcaaa

SEQ ID NO: 83 - DNA, 814 bp, Homo sapien
cctacacaacttggggcccctctcctctccagcccttctcctgtgtgcctgcctcctgccgccgccaccatgaccaccaccatccgccagttcacctcctccagctccatcaagggctcctccggcctggggggcggctcgtcccgcacctcctgccggctgtctggcggcctgggtgccggctcctgcaggctgggatctgctggcggcctgggcagcaccctcgggggtagcagctactccagctgctacagctttggctctggtggtggctatggcagcagctttgggggtgttgatgggctgctggctggaggtgagaaggccaccatgcagaacctcaatgaccgcctggcctcctacctggacaaggtgcgtgccctggaggaggccaacactgagctggaggtgaagatccgtgactggtaccagaggcaggccccggggcccgcccgtgactacagccagtactacaggacaattgaggagctgcagaacaagatcctcacagccaccgtggacaatgccaacatcctgctacagattgacaatgcccgtctggctgctgatgacttccgcaccaagtttgagacagagcagggcctgcgcctgagtgtggaggccgacatcaatggcctgcgccagggtgccggkaagatgrmcctggcagaagcgggaccgggagatgcgaaatgggagaacccaaggggagccggctacggaagaaaaccccgggggggataaaccctgaagccagggggcggggacaccgcgggatggcccccccaagggggcggagccaaccagatagggg

SEQ ID NO: 84 - DNA, 1731 bp, Homo sapien
gtggagggcacgcagacattctgggaagccacttgccccacccctgggctgcttcttcttgagatcaggaggggcgttgcccagggctggtgttgccaggtggaggcctgctgaggcagtggttgtggggatcggtctccaggcagcagggggcagcagggtcaaggagaggctaactggccacgggtggggccagcaggcgggcagaaggaggctttaaagcgcctaccctgcctgcaggtgagcagtggtgtgtgagagccaggcgtccctctgcctgcccactcagtggcaacacccgggagctgttttgtcctttgtggagcctcagcagttccctctttcagaactcactgccaagagccctgaacaggagccaccatgcagtgcttcagcttcattaagaccatgatgatcctcttcaatttgctcatctttctgtgtggtgcagccctgttggcagtgggcatctgggtgtcaatcgatggggcatcctttctgaagatcttcgggccactgtcgtccagtgccatgcagtttgtcaacgtgggctacttcctcatcgcagccggcgttgtggtctttgctcttggtttcctgggctgctatggtgctaagactgagagcaagtgtgccctcgtgacgttcttcttcatcctcctcctcatcttcattgctgaggttgcagctgctgtggtcgccttggtgtacaccacaatggtgagacactgggatggaggaagggaagaagattgggcaaaaccctgggagtgggctgtggcctgtgaatggccaccttctgtaccagcccctaaacactggcctgcctcacccaggctgagcacttcctgacgttgctggtagtgcctgccatcaagaaagattatggttcccaggaagacttcactcaagtgtggaacaccaccatgaaaggggtaaggttggctgggggaggttttagggtggagagaaagaagcaaggccccacctccaccctcatcttgtctccagctcaagtgctgtggcttcaccaactatacggattttgaggactcaccctacttcaaagagaacagtgcctttcccccattctgttgcaatgacaacgtcaccaacacagccaatgaaacctgcaccaagcaaaaggctcacgaccaaaaagtagagggttgcttcaatcagcttttgtatgacatccgaactaatgcagtcaccgtgggtggtgtggcagctggaattgggggcctcgagctggctgccatgattgtgtccatgtatctgtactgcaatctacaataagtccacttctgcctctgccactactgctgccacatgggaactgtgaagaggcaccctggcaagcagcagtgattgggggaggggacaggatctaacaatgtcacttgggccagaatggacctgccctttctgctccagacttggggctagatagggaccactccttttaggcgatgcctgactttccttccattggtgggtggatgggtggggggcattccagagcctctaaggtagccagttctgttgcccattcccccagtctattaaacccttgatatgccccctaggcctagtggtgatcccagtgctctactgggggatgagagaaaggcattttatagcctgggcataagtgaaatcagcagagcctctgggtggatgtgtagaaggcacttcaaaatgcataaacctgttacaatgttaaaaaaa

SEQ ID NO: 85 - DNA, 1778 bp, Homo sapien
ggcacccatagcccagaaaggaaataggaggctgggccctcacctgcctgttttcaatcctagctatgtggcaggaccctggcagcagtgagggaaagtcttgcccctctgcccaccctgaggatatttctagaacccctgatctcctttatatctgcccaggtgtgcagcctggtcctagctatgcatatcccagctcccatttttctggctctagaggatgtttccctccttacaggatgaggttttagactccctagccaataaagagggaagtttctcggctcccatccttcttactcagctgtgtggtagtaagctacttgccagcactgtttaaggcctgcctgacctctctctccccagctgtgtggtgcagccctgttggcagtgggcatctgggtgtcaatcgatggggcatcctttctgaagatcttcgggccactgtcgtccagtgccatgcagtttgtcaacgtgggctacttcctcatcgcagccggcgttgtggtctttgctcttggtttcctgggctgctatggtgctaagactgagagcaagtgtgccctcgtgacggtgtgtgaaacccagctccacaggctgatgaccaagagtcccctcgcccttgacaccaggccctgggattcccaaaccctgctttggacccccctaggctcaggcttctgtctcacttttccgggggggggattagggcaaggagggcatgagggactgtctctccctaaaacccagacccctgttccccactcgttcttcttcatcctcctcctcatcttcattgctgaggttgcagctgctgtggtcgccttggtgtacaccacaatggtgagacactgggatggaggaagggaagaagattgggcaaaaccctgggagtgggctgtggcctgtgaatggccaccttctgtaccagcccctaaacactggcctgcctcacccaggctgagcacttcctgacgttgctggtagtgcctgccatcaagaaagattatggttcccaggaagacttcactcaagtgtggaacaccaccatgaaagggctcaagtgctgtggcttcaccaactatacggattttgaggactcaccctacttcaaagagaacagtgcctttcccccattctgttgcaatgacaacgtcaccaacacagccaatgaaacctgcaccaagcaaaaggctcacgaccaaaaagtagagggttgcttcaatcagcttttgtatgacatccgaactaatgcagtcaccgtgggtggtgtggcagctggaattgggggcctcgagctggctgccatgattgtgtccatgtatctgtactgcaatctacaataagtccacttctgcctctgccactactgctgccacatgggaactgtgaagaggcaccctggcaagcagcagtgattgggggaggggacaggatctaacaatgtcacttgggccagaatggacctgccctttctgctccagacttggggctagatagggaccactccttttaggcgatgcctgactttccttccattggtgggtggatgggtggggggcattccagagcctctaaggtagccagttctgttgcccattcccccagtctattaaacccttgatatgccccctaggcctagtggtgatcccagtgctctactgggggatgagagaaaggcattttatagcctgggcataagtgaaatcagcagagcctctgggtggatgtgtagaaggcacttcaaaatgcataaacctgttacaatgttaaaaaaa

SEQ ID NO: 86 - DNA, 766 bp, Homo sapien
cggccgcctactactactaaattcgcggccgcgtcgactgaragggctcaagtgctgtggcttcaccaactatacggattttgaggactcaccctacttcaaagagaacagtgcctttcccccattctgttgcaatgacaacgtcaccaacacagccaatgaaacctgcaccaagcaaaaggctcacgaccaaaaagtagagggttgcttcaatcagcttttgtatgacatccgaactaatgcagtcaccgtgggtggtgtggcagctggaattgggggcctcgagctggctgccatgattgtgtccatgtatctgtactgcaatctacaataagtccacttctgcctctgccactactgctgccacatgggaactgtgaagaggcaccctggcaagcagcagtgattgggggaggggacaggatctaacaatgtcacttgggccagaatggacctgccctttctgctccagacttggggctagatagggaccactccttttaggcgatgcctgactttccttccattggtgggtggatgggtggggggcattccagagcctctaaggtagccagttctgttgcccattcccccagtctattaaacccttgatatgccccctaggcctagtggtgatcccagtgctctactgggggatgagagaaaggcattttatagcctgggcataagtgaaatcagcagagcctctgggtggatgtgtagaaggcacttcaaaatgcataaacctgttacaatgttaaaaaaa

SEQ ID NO: 87 - DNA, 1655 bp, Homo sapien
gtggagggcacgcagacattctgggaagccacttgccccacccctgggctgcttcttcttgagatcaggaggggcgttgcccagggctggtgttgccaggtggaggcctgctgaggcagtggttgtggggatcggtctccaggcagcagggggcagcagggtcaaggagaggctaactggccacgggtggggccagcaggcgggcagaaggaggctttaaagcgcctaccctgcctgcaggtgagcagtggtgtgtgagagccaggcgtccctctgcctgcccactcagtggcaacacccgggagctgttttgtcctttgtggagcctcagcagttccctctttcagaactcactgccaagagccctgaacaggagccaccatgcagtgcttcagcttcattaagaccatgatgatcctcttcaatttgctcatctttctgtgtggtgcagccctgttggcagtgggcatctgggtgtcaatcgatggggcatcctttctgaagatcttcgggccactgtcgtccagtgccatgcagtttgtcaacgtgggctacttcctcatcgcagccggcgttgtggtctttgctcttggtttcctgggctgctatggtgctaagactgagagcaagtgtgccctcgtgacgttcttcttcatcctcctcctcatcttcattgctgaggttgcagctgctgtggtcgccttggtgtacaccacaatggtgagacactgggatggaggaagggaagaagattgggcaaaaccctgggagtgggctgtggcctgtgaatggccaccttctgtaccagcccctaaacactggcctgcctcacccaggctgagcacttcctgacgttgctggtagtgcctgccatcaagaaagattatggttcccaggaagacttcactcaagtgtggaacaccaccatgaaagggctcaagtgctgtggcttcaccaactatacggattttgaggactcaccctacttcaaagagaacagtgcctttcccccattctgttgcaatgacaacgtcaccaacacagccaatgaaacctgcaccaagcaaaaggctcacgaccaaaaagtagagggttgcttcaatcagcttttgtatgacatccgaactaatgcagtcaccgtgggtggtgtggcagctggaattgggggcctcgagctggctgccatgattgtgtccatgtatctgtactgcaatctacaataagtccacttctgcctctgccactactgctgccacatgggaactgtgaagaggcaccctggcaagcagcagtgattgggggaggggacaggatctaacaatgtcacttgggccagaatggacctgccctttctgctccagacttggggctagatagggaccactccttttaggcgatgcctgactttccttccattggtgggtggatgggtggggggcattccagagcctctaaggtagccagttctgttgcccattcccccagtctattaaacccttgatatgccccctaggcctagtggtgatcccagtgctctactgggggatgagagaaaggcattttatagcctgggcataagtgaaatcagcagagcctctgggtggatgtgtagaaggcacttcaaaatgcataaacctgttacaatgttaaaaaaa

SEQ ID NO: 88 - DNA, 735 bp, Homo sapien
atgctcgagcggcgcattgtgatggatgcgtggtcgcggccgaggtactgttttggacttgtctattatgtccttgttggcctaactgtgctgagccaagtgccaatggatggcaggaatgcctacataacagggaaaaatctattgatgcaagcacggtggttccatattcttgggatgatgatgttcatctggtcatctgcccatcagtataagtgccatgttattctcggcaatctcaggaaaaataaagcaggagtggtcattcactgtaaccacaggatcccatttggagactggtttgaatatgtttcttcccctaactacttagcagagctgatgatctacgtttccatggccgtcacctttgggttccacaacttaacttggtggctagtggtgacaaatgtcttctttaatcaggccctgtctgcctttctcagccaccaattctacaaaagcaaatttgtctcttacccgaagcataggaaagctttcctaccatttttgttttaagttaacctcagtcatgaagaatgcaaaccaggtgatggtttcaatgcctaaggacagtgaagtctggagcccaaagtacagtttcagcaaagctgtttgaaactctccattccatttctataccccacaagttttcactgaatgagcatggcagtgccactcaagaaaatgaatctccaaagtatcttcaaagaataaatactaatggcagatctgcga

SEQ ID NO: 89 - DNA, 1596 bp, Homo sapien
cagctgccaggccctttctccattggttgagttcagcaggtaacctgaagctttgctgagaggtgcataaataaagagtgaaactagtaccacctccttgaaatgggctgagtccctcttgctcacccttgacttggaaaaaccagtttctcttttattgtctgttactaatctctattctaaaaattcagctcaattctcaaccatactccaaactctctcttttccagctacctttactccctctccttcaattccactttcctctgcttactttttttttttttctgacagggtctcactttgtcgcccaggcaggagtgcagtggctcaatcttgggctcactgcagcctcaacctcccaggttcaagcgattctcctgcctcagcccctcaagtagctgggactacaagcgcacaccaccacgcctgactaattttttgtatttttttgtagaggcggggtttcaccatgttgcccagactggtcttgaactcctgagcttaagcaatccacctgcctcggcctcccaaagtgttgggatcacaggcgtgagccaccgcatccggcctcatgttctttttcattaaagagagaaatcaactattcaggaccggcccccacctttcctcaggagtcatttctgttccgcacaggcctgctgaactgggtgctttatataggaaaggaccaaccacgccgagctcagttatggcacacacagtgggacctagacaaagggagagggtgaccgacatcccaactagatttcagtggagtgaagttcaggaggcatggagctgacaaccatgaggcctcggcagccaccgccaccaccgccgccgccaccaccgtagcagcagcagcagcagcagcagcagcaagagtaactctgacttaggaatagagacagccagagagaaatgtgatcaatgaaggagacatctggagtgtgcgtgcttcttcagagggacgggtgatgggcagattggaaaaagcaccgcagatgggaaccttaatctttcttttctaaaattgatgctatgaaaatttgcgttttctgtaacttgtaaaaactaaaagttgcttgtctactgaaaaaaaaaaaaaaaaaaaaaaaaaaaawaaaaaaaaaaaaagggggggggccccacacagaaaattacccacccgaggagggccacaacagaatgaaggcagaagcaccgaggcttcgatgtggaacaagaggggcgcccccaataagggggggcgcggcactaagaaagcctaagagcagcggcgccgcaagatgataacacacgggtcggacacgggaaaaaagcggatcaggcgcggtgggaacatcctcgtggcgaaggaacacccccgcactattcgtgcggtgggggcgcccaacaatgtggtgggcgacacagatcatcctcatcgaagagactatatacgagcgcccctcgagccgcgaacaattatgcaaattctcaggaggggctactgcgggcggttaaaccgccaggcggcaagtaacggtgaccccgctggcagaagacttggcgacagcggaaagcgacgtcttagtcaccttttttcgcgga

SEQ ID NO: 90 - DNA, 2391 bp, Homo sapien
aacttggactgggctgggcctctgctttgtcatttgaaaggcttgggtcatgcttccctttcctcttgggagacattaactgggagcctagggagccaaagtatcaagtggcgtcgtttcctcccttcagagccaaccttgctgggcttctccggtcagatcagccctggcccggggtcagcccggcggggaacgggtccaccctccgccagcgacctcagagctcccgggcacagcccggggcacagccccgcgcacctgccccgcccacgcccgccccgcgcacctgccgggtccgcacctgccatttgcccgactggccgcgcacccagctggcccgcccctgcccgacacgaccgctgcccgccccttgccttcctgacccaggggctccgctggctgcggtcgcctgggagctgccgccagggccaggaggggagcggcacctggaagatgcgcccattggctggtggcctgctcaaggtggtgttcgtggtcttcgcctccttgtgtgcctggtattcggggtacctgctcgcagagctcattccagatgcacccctgtccagtgctgcctatagcatccgcagcatcggggagaggcctgtcctcaaagctccagtccccaaaaggcaaaaatgtgaccactggactccctgcccatctgacacctatgcctacaggttactcagcggaggtggcagaagcaagtacgccaaaatctgctttgaggataacctacttatgggagaacagctgggaaatgttgccagaggaataaacattgccattgtcaactatgtaactgggaatgtgacagcaacacgatgttttgatatgtatgaaggcgataactctggaccgatgacaaagtttattcagagtgctgctccaaaatccctgctcttcatggtgacctatgacgacggaagcacaagactgaataacgatgccaagaatgccatagaagcacttggaagtaaagaaatcaggaacatgaaattcaggtctagctgggtatttattgcagcaaaaggcttggaactcccttccgaaattcagagagaaaagatcaaccactctgatgctaagaacaacagatattctggctggcctgcagagatccagatagaaggctgcatacccaaagaacgaagctgacactgcagggtcctgagtaaatgtgttctgtataaacaaatgcagctggaatcgctcaagaatcttatttttctaaatccaacagcccatatttgatgagtattttgggtttgttgtaaaccaatgaacatttgctagttgtatcaaatcttggtacgcagtatttttataccagtattttatgtagtgaagatgtcaattagcaggaaactaaaatgaatggaaattcttaaagggaatgatgtgattcaagctggaaagagggttgggagaaacagcttgtccaggtggagctatgttatgatcagatcgaagtgtgacccctgtgtggtccagacagccctgcagagagaaaacctttattccattatcaccaagcacctcctagtttccgacagtcatctccttctgctgggagaattagcagcagttcagggggcttatgttatgtccttgttcaactcaacttgagctcttgaactcctcctgtgggcctgtgaatgtattcattcattccacaactctgggtgcctcccacgtctggcaccgggggtacagtacacattccctgccttcatgccaggctgctgagcggggtggggagggaggcgctgctctcaggagggcaactgaacacctcactctctagaagatgcagcagtagatccaagagtccaggatgttccacacgtgctggaacggtgggtcagatgacacatgtgattcggggctaagaaaataagagtcactggggccagcagtcactgccaactgtccattctcacctctttcccgggcctggccccagaagagctaggagactttggtgctgggttaatattccttctctgagcctctatatctcatctgtaagataaaagagttgggatagatgaatggttgccaagcatttttgttggcaggactccttttaaaacatggtgctacatggcaccccgaattccagcattctcacagtaacacactgccccaattctcagtggcttacgacagcattgatttcttgtttgtgttaatgtggccacaggccagccacggctgagccctaggtgtgaaaagccaggctgaaggggtgtcccctgtcaggcatgaaagccagagagggaacagaaatccagcctccaagccccaccaagctcctggcctgatgtgtcagccccagctgctcacatcccatggctccaaacatgggaggcaccaggtcagcga

SEQ ID NO: 91 - DNA, 1703 bp, Homo sapien
aacttggactgggctgggcctctgctttgtcatttgaaaggcttgggtcatgcttccctttcctcttgggagacattaactgggagcctagggagccaaagtatcaagtggcgtcgtttcctcccttcagagccaaccttgctgggcttctccggtcagatcagccctggcccggggtcagcccggcggggaacgggtccaccctccgccagcgacctcagagctcccgggcacagcccggggcacagccccgcgcacctgccccgcccacgcccgccccgcgcacctgccgggtccgcacctgccatttgcccgactggccgcgcacccagctggcccgcccctgcccgacacgaccgctgcccgccccttgccttcctgacccaggggctccgctggctgcggtcgcctgggagctgccgccagggccaggaggggagcggcacctggaagatgcgcccattggctggtggcctgctcaaggtggtgttcgtggtcttcgcctccttgtgtgcctggtattcggggtacctgctcgcagagctcattccagatgcacccctgtccagtgctgcctatagcatccgcagcatcggggagaggcctgtcctcaaagctccagtccccaaaaggcaaaaatgtgaccactggactccctgcccatctgacacctatgcctacaggttactcagcggaggtggcagaagcaagtacgccaaaatctgctttgaggataacctacttatgggagaacagctgggaaatgttgccagaggaataaacattgccattgtcaactatgtaactgggaatgtgacagcaacacgatgttttgatatgtatgaaggcgataactctggaccgatgacaaagtttattcagagtgctgctccaaaatccctgctcttcatggtgacctatgacgacggaagcacaagactgaataacgatgccaagaatgccatagaagcacttggaagtaaagaaatcaggaacatgaaattcaggtctagctgggtatttattgcagcaaaaggcttggaactcccttccgaaattcagagagaaaagatcaaccactctgatgctaagaacaacagatattctggctggcctgcagagatccagatagaaggctgcatacccaaagaacgaagctgacactgcagggtcctgagtaaatgtgttctgtataaacaaatgcagctggaatcgctcaagaatcttatttttctaaatccaacagcccatatttgatgagtattttgggtttgttgtaaaccaatgaacatttgctagttgtcaaaaaaaaaaatacaaaaaaacaaaattttggggcggccaggccccgaaaaattttcaaacccttcgtttgggcgcgggccccccggtagggaaccggccaggtcccaagggacaccgggccaggacgagggcgcgggatttcccaaaaaaaagccgggggaacgaggcttcgaaccacccagaagggtcgaagcccatcgggccaaacacggggtcagggaaccgaataaatgcgcgcgcagagaaaaaacaccacaacacacacaacatcacagagacgaacgaagactgatgacgcaaatgcaatctatcacaggcatcacacgacacgacagacacagcagacaaaggaactaacgaggacacagcgacgcagcactacacagcacgcagcaata

SEQ ID NO: 92 - DNA, 2617 bp, Homo sapien
aacttggactgggctgggcctctgctttgtcatttgaaaggcttgggtcatgcttccctttcctcttgggagacattaactgggagcctagggagccaaagtatcaagtggcgtcgtttcctcccttcagagccaaccttgctgggcttctccggtcagatcagccctggcccggggtcagcccggcggggaacgggtccaccctccgccagcgacctcagagctcccgggcacagcccggggcacagccccgcgcacctgccccgcccacgcccgccccgcgcacctgccgggtccgcacctgccatttgcccgactggccgcgcacccagctggcccgcccctgcccgacacgaccgctgcccgccccttgccttcctgacccaggggctccgctggctgcggtcgcctgggagctgccgccagggccaggaggggagcggcacctggaagatgcgcccattggctggtggcctgctcaaggtggtgttcgtggtcttcgcctccttgtgtgcctggtattcggggtacctgctcgcagagctcattccagatgcacccctgtccagtgctgcctatagcatccgcagcatcggggagaggcctgtcctcaaagctccagtccccaaaaggcaaaaatgtgaccactggactccctgcccatctgacacctatgcctacaggttactcagcggaggtggcagaagcaagtacgccaaaatctgctttgaggataacctacttatgggagaacagctgggaaatgttgccagaggaataaacattgccattgtcaactatgtaactgggaatgtgacagcaacacgatgttttgatatgtatgaaggcgtctttctcgatggtctctcctttctaggcactgactcttgactgcagttgttggccaggatatactatcccctcttatttttatatatcaatgagactttcaaaaacaagtttttataaagatagtgaagacgaagaatagaaaacgcctgcacccacccaataagaaggacacagttgtactctgcagttaacctaagcagaacagtaaataatgagccgcagcgataactctggaccgatgacaaagtttattcagagtgctgctccaaaatccctgctcttcatggtgacctatgacgacggaagcacaagactgaataacgatgccaagaatgccatagaagcacttggaagtaaagaaatcaggaacatgaaattcaggtctagctgggtatttattgcagcaaaaggcttggaactcccttccgaaattcagagagaaaagatcaaccactctgatgctaagaacaacagatattctggctggcctgcagagatccagatagaaggctgcatacccaaagaacgaagctgacactgcagggtcctgagtaaatgtgttctgtataaacaaatgcagctggaatcgctcaagaatcttatttttctaaatccaacagcccatatttgatgagtattttgggtttgttgtaaaccaatgaacatttgctagttgtatcaaatcttggtacgcagtatttttataccagtattttatgtagtgaagatgtcaattagcaggaaactaaaatgaatggaaattcttaaagggaatgatgtgattcaagctggaaagagggttgggagaaacagcttgtccaggtggagctatgttatgatcagatcgaagtgtgacccctgtgtggtccagacagccctgcagagagaaaacctttattccattatcaccaagcacctcctagtttccgacagtcatctccttctgctgggagaattagcagcagttcagggggcttatgttatgtccttgttcaactcaacttgagctcttgaactcctcctgtgggcctgtgaatgtattcattcattccacaactctgggtgcctcccacgtctggcaccgggggtacagtacacattccctgccttcatgccaggctgctgagcggggtggggagggaggcgctgctctcaggagggcaactgaacacctcactctctagaagatgcagcagtagatccaagagtccaggatgttccacacgtgctggaacggtgggtcagatgacacatgtgattcggggctaagaaaataagagtcactggggccagcagtcactgccaactgtccattctcacctctttcccgggcctggccccagaagagctaggagactttggtgctgggttaatattccttctctgagcctctatatctcatctgtaagataaaagagttgggatagatgaatggttgccaagcatttttgttggcaggactccttttaaaacatggtgctacatggcaccccgaattccagcattctcacagtaacacactgccccaattctcagtggcttacgacagcattgatttcttgtttgtgttaatgtggccacaggccagccacggctgagccctaggtgtgaaaagccaggctgaaggggtgtcccctgtcaggcatgaaagccagagagggaacagaaatccagcctccaagccccaccaagctcctggcctgatgtgtcagccccagctgctcacatcccatggctccaaacatgggaggcaccaggtcagcga

SEQ ID NO: 93 - DNA, 2247 bp, Homo sapien
aacttggactgggctgggcctctgctttgtcatttgaaaggcttgggtcatgcttccctttcctcttgggagacattaactgggagcctagggagccaaagtatcaagtggcgtcgtttcctcccttcagagccaaccttgctgggcttctccggtcagatcagccctggcccggggtcagcccggcggggaacgggtccaccctccgccagcgacctcagagctcccgggcacagcccggggcacagccccgcgcacctgccccgcccacgcccgccccgcgcacctgccgggtccgcacctgccatttgcccgactggccgcgcacccagctggcccgcccctgcccgacacgaccgctgcccgccccttgccttcctgacccaggggctccgctggctgcggtcgcctgggagctgccgccagggccaggaggggagcggcacctggaagatgcgcccattggctggtgctccagtccccaaaaggcaaaaatgtgaccactggactccctgcccatctgacacctatgcctacaggttactcagcggaggtggcagaagcaagtacgccaaaatctgctttgaggataacctacttatgggagaacagctgggaaatgttgccagaggaataaacattgccattgtcaactatgtaactgggaatgtgacagcaacacgatgttttgatatgtatgaaggcgataactctggaccgatgacaaagtttattcagagtgctgctccaaaatccctgctcttcatggtgacctatgacgacggaagcacaagactgaataacgatgccaagaatgccatagaagcacttggaagtaaagaaatcaggaacatgaaattcaggtctagctgggtatttattgcagcaaaaggcttggaactcccttccgaaattcagagagaaaagatcaaccactctgatgctaagaacaacagatattctggctggcctgcagagatccagatagaaggctgcatacccaaagaacgaagctgacactgcagggtcctgagtaaatgtgttctgtataaacaaatgcagctggaatcgctcaagaatcttatttttctaaatccaacagcccatatttgatgagtattttgggtttgttgtaaaccaatgaacatttgctagttgtatcaaatcttggtacgcagtatttttataccagtattttatgtagtgaagatgtcaattagcaggaaactaaaatgaatggaaattcttaaagggaatgatgtgattcaagctggaaagagggttgggagaaacagcttgtccaggtggagctatgttatgatcagatcgaagtgtgacccctgtgtggtccagacagccctgcagagagaaaacctttattccattatcaccaagcacctcctagtttccgacagtcatctccttctgctgggagaattagcagcagttcagggggcttatgttatgtccttgttcaactcaacttgagctcttgaactcctcctgtgggcctgtgaatgtattcattcattccacaactctgggtgcctcccacgtctggcaccgggggtacagtacacattccctgccttcatgccaggctgctgagcggggtggggagggaggcgctgctctcaggagggcaactgaacacctcactctctagaagatgcagcagtagatccaagagtccaggatgttccacacgtgctggaacggtgggtcagatgacacatgtgattcggggctaagaaaataagagtcactggggccagcagtcactgccaactgtccattctcacctctttcccgggcctggccccagaagagctaggagactttggtgctgggttaatattccttctctgagcctctatatctcatctgtaagataaaagagttgggatagatgaatggttgccaagcatttttgttggcaggactccttttaaaacatggtgctacatggcaccccgaattccagcattctcacagtaacacactgccccaattctcagtggcttacgacagcattgatttcttgtttgtgttaatgtggccacaggccagccacggctgagccctaggtgtgaaaagccaggctgaaggggtgtcccctgtcaggcatgaaagccagagagggaacagaaatccagcctccaagccccaccaagctcctggcctgatgtgtcagccccagctgctcacatcccatggctccaaacatgggaggcaccaggtcagcga

SEQ ID NO: 94 - DNA, 1146 bp, Homo sapien
aacttggactgggctgggcctctgctttgtcatttgaaaggcttgggtcatgcttccctttcctcttgggagacattaactgggagcctagggagccaaagtatcaagtggcgtcgtttcctcccttcagagccaaccttgctgggcttctccggtcagatcagccctggcccggggtcagcccggcggggaacgggtccaccctccgccagcgacctcagagctcccgggcacagcccggggcacagccccgcgcacctgccccgcccacgcccgccccgcgcacctgccgggtccgcacctgccatttgcccgactggccgcgcacccagctggcccgcccctgcccgacacgaccgctgcccgccccttgccttcctgacccaggggctccgctggctgcggtcgcctgggagctgccgccagggccaggaggggagcggcacctggaagatgcgcccattggctggtggcctgctcaaggtggtgttcgtggtcttcgcctccttgtgtgcctggtattcggggtacctgctcgcagagctcattccagatgcacccctgtccagtgctgcctatagcatccgcagcatcggggagaggcctgtcctcaaagctccagtccccaaaaggcaaaaatgtgaccactggactccctgcccatctgacacctatgcctacaggttactcagcggaggtggcagaagcaagtacgccaaaatctgctttgaggataacctacttatgggagaacagctgggaaatgttgccagaggaataaacattgccattgtcaactatgtaactgggaatgtgacagcaacacgatgttttgatatgtatgaaggcggtaagaaaattttttctgttaaaattcaaatgaattttaaacagaaaattaagattaaaaagcacaaagaaaaatgtcaaccatttttattttgtctactagaaaaacgccagcagctctcctgagtaatctagagtggtcttatgtagatcctcttaaactctaattgaattcatagaacatttgaaggcatcatctagaaatgtcttttcttctgttagttttcctcagtctttctctttttagctctcatgatataataagaaagagaaaaagcctttttttttaaaaaaaaa

SEQ ID NO: 95 - DNA, 600 bp, Homo sapien
  misc_feature (222)..(222): n=a, c, g or t
atcgaacccgaccaccgctggtcttcgctggacaccatgaaccacactgtccaaaccttcttctctcctgtcaacagcggccagcccctcaactatgagatgctcaaggaggagcatgaggtggctgtgccaggggtgccccacaaccctgctctcccgacgtccaccgtgatccacatccgcagcgaaacctcctatctcgaccatcgcgccatgactcanaacttctgccgcttcaaataccctcacaaccaaggcaacataacaggcgcctactccgtgaagtctagggacaggaagatggttggcgacgtgaccggggcccaggcctatgcctccaccgccaagtgcctgaacatctgggccctgattctgggcatcctcatgaccattctgctcatcgtcatcccagtgctgatcttccaggcctatggatagatcaggaggcatcactgaggccaggagctctgcccatgacctgtatcccacgtactccaacttccattcctcgccctgcccccggagccgagtcctgtatcagccctttatcctcacacgcttttctacaatggcattcaataaagtgtatatgtttctggt

SEQ ID NO: 96 - DNA, 1008 bp, Homo sapien
aaaaagcaaagagcatggctaacagagataccggagaaaatttaacacgagagaatctctcctctccagcccttctcctgtgtgcctgcctcctgccgccgccaccatgaccacctccatccgccagttcacctcctccagctccatcaagggctcctccggcctggggggcggctcgtcccgcacctcctgccggctgtctggcggcctgggtgccggctcctgcaggctgggatctgctggcggcctgggcagcaccctcgggggtagcagctactccagctgctacagctttggctctggtggtggctatggcagcagctttgggggtgttgatgggctgctggctggaggtgagaaggccaccatgcagaacctcaatgaccgcctggcctcctacctggacaaggtgcgtgccctggaggaggccaacactgagctggaggtgaagatccgtgactggtaccagaggcaggccccggggcccgcccgtgactacagccagtactacaggacaattgaggagctgcagaacaagatcctcacagccaccgtggacaatgccaacatcctgctacagattgacaatgcccgtctggctgctgatgacttccgcaccaagtttgagacagagcaggccctgcgcctgagtgtggaggccgacatcaatggcctgcgcagggtgctggatgagctgaccctggccagagccgacctggagatgcagattgagaaacctcaaggaggagctggcctacctgaagaagaaccacgaggasgagatgaacgcccwggaggccrgtggtggtgagaccacgcggagaatgcgctcgcccagggggacgagcgttctcagaagggtcgacttaaaaagggaaaaaccacggagcgaatggctcaacaaaggaagcgcaggaccacagacgggaagaaagatcggaacgccagaggcgagacacaaacagcgggaaggaacccagcggattgttctgctatctcgaacaactg

SEQ ID NO: 97 - DNA, 1699 bp, Homo sapien
aatgtgtactaaatagtaataatgataaaataagtgttctcgatttcaaagaacaccaaaaaatgaaatgattcctctaaattattagtcattattctgccatctaattcatttgtgattgggagaaagtttaatgtcttcttagacgctatgtgtggtgcatagggttggactggggttagattattctcctggagaaccgcaaattcaagcatattactgtgtaactggggattactctcttcatgattggacagagtgtattgtactggttttcagaaacatatgctgaagtaaaacacagtactcagggcaattctggccagattgataactgtttcactaatgaacatcaacatatgtactgaggttggcagatgaaacaactcaagatgttcacttcttggccaatacacaggggctcttcttaacatctggacaactgtttcattgcccaaataaaatgtaacatcaattcttataagcaaacaaacccaaatgtacttactacataattcccaggagatgctgaggagtatggtattgaattggcatttgttgggtttggccagagtaccgggagaaggtggagactgagctccagggcgtgtgcgacaccgtgctgggcctgctggacagccacctcatcaaggaggccggggacgccgagagccgggtcttctacctgaagatgaagggtgactactaccgctacctggccgaggtggccaccggtgacgacaagaagcgcatcattgactcagcccggtcagcctaccaggaggccatggacatcagcaagaaggagatgccgcccaccaaccccatccgcctgggcctggccctgaacttttccgtcttccactacgagatcgccaacagccccgaggaggccatctctctggccaagaccactttcgacgaggccatggctgatctgcacaccctcagcgaggactcctacaaagacagcaccctcatcatgcagctgctgcgagacaacctgacactgtggacggccgacaacgccggggaagaggggggcgaggctccccaggagccccagagctgagtgttgcccgccaccgccccgccctgccccctccagtcccccaccctgccgagaggactagtatggggtgggaggccccacccttctcccctaggcgctgttcttgctccaaagggctccgtggagagggactggcagagctgaggccacctggggctggggatcccactcttcttgcagctgttgagcgcacctaaccactggtcatgcccccacccctgctctccgcacccgcttcctcccgaccccaggaccaggctacttctcccctcctcttgcctccctcctgcccctgctgcctctgatcgtaggaattgaggagtgtcccgccttgtggctgagaactggacagtggcaggggctggagatgggtgtgtgtgtgtgtgtgtgtgtgtgtgtgtgtgcgcgcgcgccagtgcaagaccgagattgagggaaagcatgtctgctgggtgtgaccatgtttcctctcaataaagttcccctgtgacactcaaaaaaaaaaaagggggcggccagcagaaaagggacctcgtaaacccgggaataaatccgggaccggaacctgcaggcgagacccgcagaaactcgatatcaggcttatagataccggcaacctcgagggcg

SEQ ID NO: 98 - DNA, 2788 bp, Homo sapien
gaagactgccccttctccaccatccctgcctcaccatcatctttcctcccaaggcagtgacatccagcaccccgatccctagggccctggggacccagcctttggcaaagtctcctcaggcttggatcaggcctgaacccagctgtctctacccccaggaaacataccgatgtgttcaactggaaggtgcgggcaggctcagacaaactgggcagcttcccatccctggctgtggccaagatcatcatcattgaattcaaccccatgtaccccaaagacaatgacatcgccctcatgaagctgcagttcccactcactttctcaggcacagtcaggcccatctgtctgcccttctttgatgaggagctcactccagccaccccactctggatcattggatggggctttacgaagcagaatggagggaagatgtctgacatactgctgcaggcgtcagtccaggtcattgacagcacacggtgcaatgcagacgatgcgtaccagggggaagtcaccgagaagatgatgtgtgcaggcatcccggaagggggtgtggacacctgccagggtgacagtggtgggcccctgatgtaccaatctgaccagtggcatgtggtgggcatcgttagctggggctatggctgcgggggcccgagcaccccaggagtatacaccaaggtctcagcctatctcaactggatctacaatgtctggaaggctgagctgtaatgctgctgcccctttgcagtgctgggagccgcttccttcctgccctgcccacctggggatcccccaaagtcagacacagagcaagagtccccttgggtacacccctctgcccacagcctcagcatttcttggagcagcaaagggcctcaattcctataagagaccctcgcagcccagaggcgcccagaggaagtcagcagccctagctcggccacacttggtgctcccagcatcccagggagagacacagcccactgaacaaggtctcaggggtattgctaagccaagaaggaactttcccacactactgaatggaagcaggctgtcttgtaaaagcccagatcactgtgggctggagaggagaaggaaagggtctgcgccagccctgtccgtcttcacccatccccaagcctactagagcaagaaaccagttgtaatataaaatgcactgccctactgttggtatgactaccgttacctactgttgtcattgttattacagctatggccactattattaaagagctgtgtaacatctctggcataggctagctggaatgcttgataagaactgagctgggatgattgaactttcattctttggcttggggagaaaagaagtcctggggaagcaattgagtctcaaagtagaggcaggggaaaaaagagttagggagaccagatctgctgagtggcagcaagagtgagctgcagattacagaaaccagggtgagcaagtttgagtcccacacagggccttctccctttgcctctttccctccctccctgcctgtgataatcagccaggaccagggataacctatgacttgggaaagagatgagttaggcagtcaagggtgacattcaatcagggatccacaagtggctggaaagaaatgctggtcctgtgtcctaactttttccacctggagagccctcagtgtggcttcttacatttaaaaaacaaaaaggatcagctgccaggtgtgaggcagtccccaagctgagttgtgaggatgtaagcatgaataagtccctgcactcaaaatggtcaaagaattaaaccccatggacttttttggcatctgtatgaaagcttgggttttctgaggactgtcttgctatagttaagtcagatcctagatgaaatatacttgttcatactgtactaggttcttaggaaacaacagaattcctcaaatgcctaaaacaaagaaaatagaaacccagaaaacaaaacaaaataaaacaaaaccatcagaactgtgagtggaaactaaggtgatgatctgggagcaatacactaaaatcttgggtcgagacctatatgaaggctggcagtggagctaaacctggacacactgaagacaagggagctgaaccagggctcctacatgaagcagggataactgatggcagtaaatgtggtctcaaattgcagatggtctggaggaaaatttcccaaatttagagcctcaggattcccaaagatcctccaaatatgagctcacaatcaaagatcagagacgttgaaaaataaaaaacaccttaagtgggcagcataaaaaacagctaatttagaaccccaaaggcttcagatgtcagaatattagagacttatgataataagcaatatttgcagagtatttgtatgtgccagacactattgtaagtgcttcatcatgtactgattcatttaatactcacagaaatctgtgagatgggtattattcttatcctcactctatggattaaaaaaactaaggcacaaagtggttaagctccttgcctgagattatagactgtaagttgaacgtgagcacttggaatacagagttcatgctgtaaactaccacactatagggcctccaatatgataatttataaaatatttgaataaaaaatgaatactagttccacattttaaaatcatgtttaactgtggtcaaatgcacataacacaagttgccatcttcaccatttttaggtgtatagttcagtggtgttatgtacattcacactattgtgcagtcatcaccacactgcctacactagtgga

SEQ ID NO: 99 - DNA, 924 bp, Homo sapien
  misc_feature (899)..(899): n=a, c, g or t
gtrgccttcctgagcacctttccttctttcagccaactgctcactcgctcacctccctccttggcaccatgaccacctgcagccgccagttcacctcctccagctccatgaagggctcctgcggcatcggaggcggcatcgggggcggctccagccgcatctcctccgtcctggccggagggtcctgccgtgcccccagcacctacgggggcggcctgtctgtcatcctctcgcttctcctctgggggagcctgcgggctggggggcggctatggcggtggcttcagcagcagcagcagctttggtagtggctttgggggaggatatggtggtggccttggtgctggcttcggtggtggcttgggtgctggctttgggtgttgatgggctgctggctggaggtgagaaggccaccatgcagaacctcaatgaccgcctggcctcctacctggacaaggtgcgtgccctggaggaggccaacactgagctggaggtgaagatccgtgactggtaccagaggcaggccccggggcccgcccgtgactacagccagtactacaggacaattgaggagctgcagaacaagatcctcacagccaccgtggacaatgccaacatcctgctacagattgacaatgcccgtctggctgctgatgacttccgcaccaagtttgagacagagcaggccctgcgcctgagtgtggaggccgacatcaatggcctgcgcagggtgctggatgagctgaccctggccagagccgacctggagatgcagattgagaacctcaagggaggagctggcctaactgaagaagaaccacgaggaggagatgaacgscctggaagcaggtgggtggtgagatcaatgtggagaaggacgctgccccaggcgtggaccnaagccgcatcctcaacgagatgcgt

SEQ ID NO: 100 - DNA, 754 bp, Homo sapien
  misc_feature (597)..(597): n=a, c, g or t
acgcgaacaccccacactcctccacccttctgaacgcctggggctcggcacattgcccctcacaacgagccacacttgtgttcaaagctcacatttccctgggatatgacaacaccgagaatttggctaccacgcacaccacagggttggtggagcctcactggcccaccactggcctccaaaggaggtaaagagacccctggagccaaccagccccacgcacagagcacacaaagaggaaagaagagaagacccctcactgctggggaggtccctgccaccacactcagtcccccaccacactgaatctcccctcctcacagttgccatgtagaccccttgaagaggggaggggcctagggagccgcaccttgtcatgtaccatcaataaagtaccctgtgctcaaccaaaaaaaaaaaaaaaaaaagggggggtaatgtcgggggggggcaacaaggggacatgaaggcgcatggggcaccaaagcgggttcctggacccagtttctggcgcccacggcggcaattcggcgggtcccctaagggaagccgatgaattcgaaacccgttaacctgtagtcatttttcgacaaaacnaacaaaacaacagcacggacacacgagagtacccacattgacaaaaagtcggtagaaagagaaacaaggacaaataccacgaaagacgaaacagataagagacaaacgaaggcagaaggaaacagacaaaaacgacaagaagaaaaaataatacaca

SEQ ID NO: 101 - DNA, 1068 bp, Homo sapien
aattacggcttaggtacgaggctggtgtgcaagctgagaacgggaagcttgtcatcaatggaaatcccatcaccatcttccaggagcgagatccctccaaaatcaagtggggcgatgctggcgctgagtacgtcgtggagtccactggcgtcttcaccaccatggagaaggctggggctcatttgcaggggggagccaaaagggtcatcatctctgccccctctgctgatgcccccatgttcgtcatgggtgtgaaccatgagaagtatgacaacagcctcaagatcatcagcaatgcctcctgcaccaccaactgcttagcacccctggccaaggtcatccatgacaactttggtatcgtggaaggactcatgaccacagtccatgccatcactgccacccagaagactgtggatggcccctccgggaaactgtggcgtgatggccgcggggctctccagaacatcatccctgcctctactggcgctgccaaggctgtgggcaaggtcatccctgagctgaacgggaagctcactggcatggccttccgtgtccccactgccaacgtgtcagtggtggacctgacctgccgtctagaaaaacctgccaaatatgatgacatcaagaaggtggtgaagcaggcgtcggagggccccctcaagggcatcctgggctacactgagcaccaggtggtctcctctgacttcaacagcgacacccactcctccacctttgacgctggggctggcattgccctcaacgaccactttgtcaagctcatttcctggtatgacaacgaatttggctacagcaacagggtggtggacctcatggccacatggctcaagagtagaccctggacacagccagagagccagagagaaagagactcactgtgggagcckgccatcagkcccmmcaakgawtycccycakgcagaccygaagggggrggsgccsgtgccaaagccggsccaaaaaaggggggaatccggcaccccccttaagccaagggaaaacggggcagggaaggggggcctgtggacccactatgggtaggtgcaccgtg

SEQ ID NO: 102 - DNA, 1847 bp, Homo sapien
ccagcgtgcagcctggcctggtacctcctgccagcatctcttgggtttgctgagaactcacgggctccagctacctggccatgaccaccacatttctgcaaacttcttcctccacctttgggggtggctcaacccgagggggttccctcctggctgggggaggtggctttggtggggggagtctctctgggggaggtggaagccgaagtatctcagcttcttctgctaggtttgtctcttcagggtcaggaggaggatatgggggtggcatgagggtctgtggctttggtggaggggctggtagtgttttcggtggaggctttggagggggcgttggtgggggttttggtggtggctttggtggtggcgatggtggtctcctctctggcaatgagaaaattaccatgcagaacctcaatgaccgcctggcctcctacctggacaaggtacgtgccctggaggaggccaatgctgacctggaggtgaagatccatgactggtaccagaagcagaccccagccagcccagaatgcgactacagccaatacttcaagaccattgaagagctccgggacaagatcatggccaccaccatcgacaactcccgggtcatcctggagatcgacaatgccaggctggctgcggacgacttcaggctcaagtgcgctcccccgtctctctcctcttcctgcattgcccactttacttggccttctcctggctctgactcaggcagccaagacccctcccacttccttctttggcctccctctcctcaggtatgagaatgagctggccctgcgccagggcgttgaggctgacatcaacggcttgcgccgagtcctggatgagctgaccctggccaggactgacctggagatgcagatcgagggcctgaatgaggagctagcctacctgaagaagaaccacgaagaggagatgaaggagttcagcagccagctggccggccaggtcaatgtggagatggacgcagcaccgggtgtggacctgacccgtgtgctggcagagatgagggagcagtacgaggccatggcggagaagaaccgccgggatgtcgaggcctggttcttcagcaagactgaggagctgaacaaagaggtggcctccaacacagaaatgatccagaccagcaagacggagatcacagacctgagacgcacgatgcaggagctggagatcgagctgcagtcccagctcagcatgaaagctgggctggagaactcactggccgagacagagtgccgctatgccacgcagctgcagcagatccaggggctcattggtggcctggaggcccagctgagtgagctccgatgcgagatggaggctcagaaccaggagtacaagatgctgcttgacataaagacacggctggagcaggagatcgctacttaccgcagcctgctcgagggccaggatgccaagatggctggcattggcatcagggaagcctcttcaggaggtggtggtagcagcagcaatttccacatcaatgtagaagagtcagtggatggacaggtggtttcttcccacaagagagaaatctaagtgtctattgcaggagaaacgtcccttgccactccccactctcatcaggccaagtggaggactggccagagggcctgcacatgcaaactccagtccctgccttcagagagctgaaaagggtccctcggtcttttatttcagggctttgcatgcgctctattccccctctgcctctccccaccttctttggagcaaggagatgcagctgtattgtgtaacaagctcatttgtacagtgtctgttcatgtaataaagaattacttttccttttgcaaata

SEQ ID NO: 103 - DNA, 1613 bp, Homo sapien
ccagcgtgcagcctggcctggtacctcctgccagcatctcttgggtttgctgagaactcacgggctccagctacctggccatgaccaccacatttctgcaaacttcttcctccacctttgggggtggctcaacccgagggggttccctcctggctgggggaggtggctttggtggggggagtctctctgggggaggtggaagccgaagtatctcagcttcttctgctaggtttgtctcttcagggtcaggaggaggatatgggggtggcatgagggtctgtggctttggtggaggggctggtagtgttttcggtggaggctttggagggggcgttggtgggggttttggtggtggctttggtggtggcgatggtggtctcctctctggcaatgagaaaattaccatgcagaacctcaatgaccgcctggcctcctacctggacaaggtacgtgccctggaggaggccaatgctgacctggaggtgaagatccatgactggtaccagaagcagaccccagccagcccagaatgcgactacagccaatacttcaagaccattgaagagctccgggacaagatcatggccaccaccatcgacaactcccgggtcatcctggagatcgacaatgccaggctggctgcggacgacttcaggctcaagtatgagaatgagctggccctgcgccagggcgttgaggctgacatcaacggcttgcgccgagtcctggatgagctgaccctggccaggactgacctggagatgcagatcgagggcctgaatgaggagctagcctacctgaagaagaaccacgaagaggagatgaaggagttcagcagccagctggccggccaggtcaatgtggagatggacgcagcaccgggtgtggacctgacccgtgtgctggcagagatgagggagcagtacgaggccatggcggagaagaaccgccgggatgtcgaggcctggttcttcagcaagactgaggagctgaacaaagaggtggcctccaacacagaaatgatccagaccagcaagacggagatcacagacctgagacgcacgatgcaggagctggagatcgagctgcagtcccagctcagcatgaaagctgggctggagaactcactggccgagacagagtgccgctatgccacgcagctgcagcagatccaggggctcattggtggcctggaggcccagctgagtgagctccgatgcgagatggaggctcagaaccaggagtacaagatgctgcttgacataaagacacggctggagcaggagatcgctacttaccgcagcctgctcgagggccaggatgccaagatggctggcattggcatcagggaagacgtcccttgccactccccactctcatcaggccaagtggaggactggccagagggcctgcacatgcaaactccagtccctgccttcagagagctgaaaagggtccctcggtcttttatttcagggctttgcatgcgctctattccccctctgcctctccccaccttctttggagcaaggagatgcagctgtattgtgtaacaagctcatttgtacagtgtctgttcatgtaataaagaattacttttccttttgcaaata

SEQ ID NO: 104 - DNA, 1490 bp, Homo sapien
ccagcgtgcagcctggcctggtacctcctgccagcatctcttgggtttgctgagaactcacgggctccagctacctggccatgaccaccacatttctgcaaacttcttcctccacctttgggggtggctcaacccgagggggttccctcctggctgggggaggtggctttggtggggggagtctctctgggggaggtggaagccgaagtatctcagcttcttctgctaggtttgtctcttcagggtcaggaggaggatatgggggtggcatgagggtctgtggctttggtggaggggctggtagtgttttcggtggaggctttggagggggcgttggtgggggttttggtggtggctttggtggtggcgatggtggtctcctctctggcaatgagaaaattaccatgcagaacctcaatgaccgcctggcctcctacctggacaaggtacgtgccctggaggaggccaatgctgacctggaggtgaagatccatgactggtaccagaagcagaccccagccagcccagaatgcgactacagccaatacttcaagaccattgaagagctccgggacaagatcatggccaccaccatcgacaactcccgggtcatcctggagatcgacaatgccaggctggctgcggacgacttcaggctcaagtatgagaatgagctggccctgcgccagggcgttgaggctgacatcaacggcttgcgccgagtcctggatgagctgaccctggccaggactgacctggagatgcagatcgagggcctgaatgaggagctagcctacctgaagaagaaccacgaagaggagatgaaggagttcagcagccagctggccggccaggtcaatgtggagatggacgcagcaccgggtgtggacctgacccgtgtgctggcagagatgagggagcagtacgaggccatggcggagaagaaccgccgggatgtcgaggcctggttcttcagcaagactgaggagctgaacaaagaggtggcctccaacacagaaatgatccagaccagcaagacggagatcacagacctgagacgcacgatgcaggagctggagatcgagctgcagtcccagctcagcatgaaagctgggctggagaactcactggccgagacagagtgccgctatgccacgcagctgcagcagatccaggggctcattggtggcctggaggcccagctgagtgagctccgatgcgagatggaggctcagaaccaggagtacaagatgctgcttgacataaagacacggctggagcaggagatcgctacttaccgcagcctgctcgagggccaggatgccaagatggctggcattggcatcagggaagggctttgcatgcgctctattccccctctgcctctccccaccttctttggagcaaggagatgcagctgtattgtgtaacaagctcatttgtacagtgtctgttcatgtaataaagaattacttttccttttgcaaata

SEQ ID NO: 105 - DNA, 986 bp, Homo sapien
ccagcgtgcagcctggcctggtacctcctgccagcatctcttgggtttgctgagaactcacgggctccagctacctggccatgaccaccacatttctgcaaacttcttcctccacctttgggggtggctcaacccgagggggttccctcctggctgggggaggtggctttggtggggggagtctctctgggggaggtggaagccgaagtatctcagcttcttctgctaggtttgtctcttcagggtcaggaggaggatatgggggtggcatgagggtctgtggctttggtggaggggctggtagtgttttcggtggaggctttggagggggcgttggtgggggttttggtggtggctttggtggtggcgatggtggtctcctctctggcaatgagaaaattaccatgcagaacctcaatgaccgcctggcctcctacctggacaaggtacgtgccctggaggaggccaatgctgacctggaggtgaagatccatgactggtaccagaagcagaccccagccagcccagaatgcgactacagccaatacttcaagaccattgaagagctccgggacaagatcatggccaccaccatcgacaactcccgggtcatcctggagatcgacaatgccaggctggctgcggacgacttcaggctcaagtatgagaatgagctggccctgcgccagggcgttgaggctgacatcaacggcttgcgccgagtcctggatgagctgaccctggccaggactgacctggagatgcagatcgagggcgagggcctgcacatgcaaactccagtccctgccttcagagagctgaaaagggtccctcggtcttttatttcagggctttgcatgcgctctattccccctctgcctctccccaccttctttggagcaaggagatgcagctgtattgtgtaacaagctcatttgtacagtgtctgttcatgtaataaagaattacttttccttttgcaaata

SEQ ID NO: 106 - DNA, 454 bp, Homo sapien
gcggccgcctactactactaaattcgcggccgcgtcgtcaaatttgtctccaccacctcctcctcccggaagagcttcaagagctaagaacctgctgcaagtcactgccttccaagtgcagcaacccagcccatggagattgcctcttctaggcagttgctcaagccatgttttatccttttctggagagtagtctagaccaagccaattgcagaaccacattctttggttcccaggagagccccattcccagcccctggtctcccgtgccgcagttctatattctgcttcaaatcagccttcaggtttcccacagcatggcccctgctgacacgagaacccaaagttttcccaaatctaaatcatcaaaacagaatccccaccccaatcccaaattttgttttggttctaactacctccagaatgtgttcaataaaatgcttttataatataa

SEQ ID NO: 107 - DNA, 2674 bp, Homo sapien
gttcccttctgaagtttcaggtaggtgtgaatcttccgggacactgtcccacccggtacaggtgggcaggattgttcctcctcattccaccccatcagcacgtgctaccccatcagcatgtgccacttgcacgtgccatgtgcaagagcatttgaggtctcagagaagatcccaaagaatagacagcgcccttgttagcacctgggctgacaggcttctttgggagagatgacaacgaatagccatgccgggaacttgccgtgtggcccctctccctttccccacctgtgatgtgcagggccactgaccccaggtgtcctccctgctccagtgatcatggacagcatggggtcatgggcgtacacacaggtgctgataccaggggtcagtatttaacatacttgctttacagatgggaacagggaggctcagggggacactctcaaaattacacagcttttaacaggtggcagaattggggttcagacccagatctgggttcaagtcactcatggtgtgattgcggcagttccttcccgcatctgggccttgccatctctctctccgagtggacatggagaggacgggggcccagcagctggatggctgcagggatcaagtcttctctggggctggcacgtagaagagcatgtggctggtggacgggcatgcctggctcctcacctggcagtctcctgccctctaaccggctgtctcttgttcccctagtgccctcggctagcatgacccgcctgatgcggtcccgcacagcctctggttccagcgtcacttctctggatggcacccgcagccgctcccacaccagcgagggcacccgaagccgctcccacaccagcgagggcacccgcagccgctcgcacaccagcgagggggcccacctggacatcacccccaactcgggtgctgctgggaacagcgccgggcccaagtccatggaggtctcctgctaggcggcctgcccagctgccgcccccggactctgatctctgtagtggccccctcctccccggccccttttcgccccctgcctgccatactgcgcctaactcggtattaatccaaagcttattttgtaagagtgagctctggtggagacaaatgaggtctattacgtgggtgccctctccaaaggcggggtggcggtggaccaaaggaaggaagcaagcatctccgcatcgcatcctcttccattaaccagtggccggttgccactctcctcccctccctcagagacaccaaactgccaaaaacaagacgcgtagcagcacacacttcacaaagccaagcctaggccgccctgagcatcctggttcaaacgggtgcctggtcagaaggccagccgcccacttcccgtttcctctttaactgaggagaagctgatccagtttccggaaacaaaatccttttctcatttggggaggggggtaatagtgacatgcaggcacctcttttaaacaggcaaaacaggaagggggaaaaggtgggattcatgtcgaggctagaggcatttggaacaacaaatctacgtagttaacttgaagaaaccgatttttaaagttggtgcatctagaaagctttgaatgcagaagcaaacaagcttgatttttctagcatcctcttaatgtgcagcaaaagcaggcgacaaaatctcctggctttacagacaaaaatatttcagcaaacgttgggcatcatggtttttgaaggctttagttctgctttctgcctctcctccacagccccaacctcccacccctgatacatgagccagtgattattcttgttcagggagaagatcatttagatttgttttgcattccttagaatggagggcaacattccacagctgccctggctgtgatgagtgtccttgcaggggccggagtaggagcactggggtgggggcggaattggggttactcgatgtaagggattccttgttgttgtgttgagatccagtgcagttgtgatttctgtggatcccagcttggttccaggaattttgtgtgattggcttaaatccagttttcaatcttcgacagctgggctggaacgtgaactcagtagctgaacctgtctgacccggtcacgttcttggatcctcagaactctttgctcttgtcggggtgggggtgggaactcacgtggggagcggtggctgagaaaatgtaaggattctggaatacatattccatgggactttccttccctctcctgcttcctcttttcctgctccctaacctttcgccgaatggggcagcaccactgacgtttctgggcggccagtgcggctgccaggttcctgtactactgccttgtacttttcattttggctcaccgtggattttctcataggaagtttggtcagagtgaattgaatattgtaagtcagccactgggacccgaggatttctgggaccccgcagttgggaggaggaagtagtccagccttccaggtggcgtgagaggcaatgactcgttacctgccgcccatcaccttggaggccttccctggccttgagtagaaaagtcggggatcggggcaagagaggctgagtacggatgggaaactattgtgcacaagtctttccagaggagtttcttaatgagatatttgtatttatttccagaccaataaatttgtaactttgca

SEQ ID NO: 108 - DNA, 1629 bp, Homo sapien
ctgctctggcaaccaatagaagctaggagagggcggggacaactgggtcttttgcggctgcagcgggcttgtaggtgtccggctttgctggcccagcaagcctgataagcatgaagctcttatctttggtggctgtggtcgggtgtttgctggtgcccccagctgaagccaacaaggtgagggaggtgagcctgcagcacctggtcacgaccaccgtgcacggccaccctgtctacagggctgactcagagagttctgaagatatccggtgcaaatgcatctgtccaccttatagaaacatcagtgggcacatttacaaccagaatgtatcccagaaggactgcaactgcctgcacgtggtggagcccatgccagtgcctggccatgacgtggaggcctactgcctgctgtgcgagtgcaggtacgaggagcgcagcaccaccaccatcaaggtcatcattgtcatctacctgtccgtggtgggtgccctgttgctctacatggccttcctgatgctggtggaccctctgatccgaaagccggatgcatacactgagcaactgcacaatgaggaggagaatgaggatgctcgctctatggcagcagctgctgcatccctcgggggaccccgagcaaacacagtcctggagcgtgtggaaggtgcccagcagcggtggaagctgcaggtgcaggagcagcggaagacagtcttcgatcggcacaagatgctcagctagatgggctggtgtggttgggtcaaggccccaacaccatggctgccagcttccaggctggacaaagcagggggctacttctcccttccctcggttccagtcttccctttaaaagcctgtggcatttttcctccttctccctaactttagaaatgttgtacttggctattttgattagggaagagggatgtggtctctgatctccgttgtcttcttgggtctttggggttgaagggagggggaaggcaggccagaagggaatggagacattcgaggcggcctcaggagtggatgcgatctgtctctcctggctccactcttgccgccttccagctctgagtcttgggaatgttgttacccttggaagataaagctgggtcttcaggaactcagtgtctgggaggaaagcatggcccagcattcagcatgtgttcctttctgcagtggttctttatcaccacctccctcccagccccagcgcctcagccccagccccagctccagccctgaggacagctctgatgggagagctgggccccctgagcccactgggtcttcagggtgcactggaagctggtgttcgctgtcccctgtgcacttctcgcactggggcatggagtgcccatgcatactctgctgccggtcccctcacctgcacttgaggggtctgggcagtccctcctctccccagtgtccacagtcactgagccagacggtcggttggaacatgagactcgaggctgagcgtggatctgaacaccacagcccctgtacttgggttgcctcttgtccctgaacttcgttgtaccagtgcatggagagaaaattttgtcctcttgtcttagagttgtgtgtaaatcaaggaagccatcattaaattgttttatttctctca

SEQ ID NO: 109 - DNA, 1645 bp, Homo sapien
ccccctcccatctggagcagatgtgttgccatctcagggtagccagaccctagcccctgggccttcttcctgtcccctgggcaatggcgtggagggcaggggagttctctagcctagtactagccctgggggcacctcggtgcattgctgaaacaacagatgtcatcaagtcctctgcctaagtgaggtcttgaagcctatacttagcatccttcttgagagttagaaatagtggaatggggcatggtgaggggtgggttcaggctgggaacctcccttgagctagctgtgtggcagtaactggagccccagcagaacctactcttcctggagtgcttcctttcccaggccccagggaggggcaggggccccatcctgcagatgctacagacactaaggcttccagcagacctggcacactgtgttcagctctgcagatgacaaggcaaggtcctcagcctgcagcacttggggaggcccagcctcccagtctggggaaggtaaggctttggggttcgttctttccatgtcagactttcaggatccaagacccttctggcttaccgtgccagatcttctctttttttcttcccactacaggatgctcgctctatggcagcagctgctgcatccctcgggggaccccgagcaaacacagtcctggagcgtgtggaaggtgcccagcagcggtggaagctgcaggtgcaggagcagcggaagacagtcttcgatcggcacaagatgctcagctagatgggctggtgtggttgggtcaaggccccaacaccatggctgccagcttccaggctggacaaagcagggggctacttctcccttccctcggttccagtcttccctttaaaagcctgtggcatttttcctccttctccctaactttagaaatgttgtacttggctattttgattagggaagagggatgtggtctctgatctccgttgtcttcttgggtctttggggttgaagggagggggaaggcaggccagaagggaatggagacattcgaggcggcctcaggagtggatgcgatctgtctctcctggctccactcttgccgccttccagctctgagtcttgggaatgttgttacccttggaagataaagctgggtcttcaggaactcagtgtctgggaggaaagcatggcccagcattcagcatgtgttcctttctgcagtggttctttatcaccacctccctcccagccccagcgcctcagccccagccccagctccagccctgaggacagctctgatgggagagctgggccccctgagcccactgggtcttcagggtgcactggaagctggtgttcgctgtcccctgtgcacttctcgcactggggcatggagtgcccatgcatactctgctgccggtcccctcacctgcacttgaggggtctgggcagtccctcctctccccagtgtccacagtcactgagccagacggtcggttggaacatgagactcgaggctgagcgtggatctgaacaccacagcccctgtacttgggttgcctcttgtccctgaacttcgttgtaccagtgcatggagagaaaattttgtcctcttgtcttagagttgtgtgtaaatcaaggaagccatcattaaattgttttatttctctca

SEQ ID NO: 110 - DNA, 499 bp, Homo sapien
ggccgcaggtgtgctggaattcgcccttagcgtggtcgcggccgaggtaccgacggctcctggagggagagagtgaagggacacgggaagaatcaaagtcgagcatgaaagtgtctgcaactccaaagatcaaggccataacccaggagaccatcaacggaagattagttctttgtcaagtgaatgaaatccaaaagcacgcatgagaccaatgaaagtttccgcctgttgtaaaatctattttcccccaaggaaagtccttgcacagacaccagtgagtgagttctaaaagatacccttggaattatcagactcagaaacttttattttttttttctgtaacagtctcaccagacttctcataatgctcttaatatattgcacttttctaatcaaagtgcgagtttatgagggtaaagctctactttcctactgcagccttcagattctcatcattttgcatctattttgtagccaataaaactccgcactagctgca

SEQ ID NO: 111 - DNA, 1354 bp, Homo sapien
ggccgcaggtgtgctggaattcgcccttagcgtggtcgcggccgagtactgctttgaaggagaaaaggaacaagaaagaggtagaaacaacaaaagtttaactttgtttagcccagtattcccaaacatctttgacctggaaacatgctttctcagattacctttaatatctcacagaaaagttccaggagactgtagtctgggacaagtggcactttctgattagtttgtgataaacctattctaaggcattggagattcaaagaatcagttggagtaatcatcacaggacagctggtctcactgctacccatctacaaaataagacaagggtctttgagactctcttcacacatgtcttaggatggggaacccatacttgatgggatggtcccaatggagaggttttagtttaacaaaattctcccttgtaaatttattgatgatttcaattcttccctatggtctagaattgctttattgatgtttcaacaggcacttattcaaataagttatatatttgaaaacagccatggtaagcatccttggcttctcacccattcctcatgtggcatgctttctagactttaaaatgaggtaccctgaatagcactaagtgctctgtaagctcaaggaatctgtgcagtgctacaaagcccacaggcagagaaagaactcctcaagtgcttgtggtcagagactaggttccatatgaggcacacctatgatgaaggtcttcacctccagaaggtgacactgttcagagatcctcatttcctggagagtgggagaaaatccctcctttgggaaatcccttttcccagcagcagagcccacctcattgcttagtgatcatttggaaggcactgagagccttcaggggctgacagcagagaaatgaaaatgagtacagttcagatggtggaagaagcatggcagtgacatcttccatgctctttttctcagtgtctgcaactccaaagatcaaggccataacccaggagaccatcaacggaagattagttctttgtcaagtgaatgaaatccaaaagcacgcatgagaccaatgaaagtttccgcctgttgtaaaatctattttcccccaaggaaagtccttgcacagacaccagtgagtgagttctaaaagatacccttggaattatcagactcagaaacttttattttttttttctgtaacagtctcaccagacttctcataatgctcttaatatattgcacttttctaatcaaagtgcgagtttatgagggtaaagctctactttcctactgcagccttcagattctcatcattttgcatctattttgtagccaataaaactccgcactagctgca

SEQ ID NO: 112 - DNA, 4080 bp, Homo sapien
tgatcgctcactatagggcaattgtggcctctagatgcatgtcgagcggcgcagtgtgatggatagcggccgcccgggcagggggctcagtggccgggtccctgagctccctagagtcggccaccacagattcagacttggactatgattatctacagaactggggacctcgttttaagaaactagcagatttgtatggttccaaagacacttttgatgacgattcttaacaataacgatacaaatttggccttaagaactgtgtctggcgttctcaagaatctagaagatgtgtaaacaggtatttttttaaatcaaggaaaggctcatttaaaacaggcaaagttttacagagaggatacatttaataaaactgcgaggacatcaaagtggtaaatactgtgaaataccttttctcacaaaaaggcaaatattgaagttgtttatcaacttcgctagaaaaaaaaaacacttggcatacaaaatatttaagtgaaggagaagtctaacgctgaactgacaatgaagggaaattgtttatgtgttatgaacatccaagtctttcttcttttttaagttgtcaaagaagcttccacaaaattagaaaggacaacagttctgagctgtaatttcgccttaaactctggacactctatatgtagtgcatttttaaacttgaaatatataatattcagccagcttaaacccatacaatgtatgtacaatacaatgtacaattatgtctcttgagcatcaatcttgttactgctgattcttgtaaatctttttgcttctactttcatcttaaactaatacgtgccagatataactgtcttgtttcagtgagagacgccctatttctatgtcatttttaatgtatctatttgtacaattttaaagttcttattttagtatacatataaatatcagtattctgacatgtaagaaaatgttacggcatcacacttatattttatgaacattgtactgttgctttaatatgagcttcaatataagaagcaatctttgaaataaaaaaagatttttttttaattctgggtttgattcttaacattgaaacaaacgttaagtatttctaatgatccatttatatttctaatttaattgtgatcttttaataaccctatttatgatctgttgttgtctgtctgctgcttttattgtttatttaaaatcaaatatgttttacaaatgttttttcagacaagattctgtaacatcatgtaaagcttttttgtacattcttggtgttaacctcctggcttctcttcacacacatcttctaaaaaagaaggatgtgaaagaactaggtcagtctatgactttgcaatatgtgttatatagtatgcatttatcttgtatatcagtaatttgatggttatgagagatgaatccatgagggaatggagctatcagaactctaatgttccaggtatacattctatgccccacactgagcactggggaactgggggactagagtcaaaaatataaatttgcccagactctaatgttattctattttttcttctgttgaacttaccaggctattgtaagactcttgatagttgaaactgcttatttttcctcctgtaattttaactaattgtaaaatgatgtggcattttatgttttaatgagaatgggcgattcatttaaaaaagctttgtttagaatatgcttggggccgtaagctcagaatgagggcagggaccattttggattctgagagtcgatgccatttggtccaggagtgtgtctacagtcccctgcattccagctagtttcttggggattgaaacttatgtgaagggcatttcacctgttcagttgggccaaaggtcaaaacgtagcaatacttggggaaagaccacataaagtcacactgcaagtgctttccctctttccccctacacacagggcacgtgctttttcttggattgcagacaatttttacagtttttttctgactttattgtgaaagtttgtttcaagcatttcttgatatcatgttatgtactatttttatgatttagtcaacatgcatacaaagaaatgttttttatgaagtgctcacttccattttactttgcattgaaatcaaattgggctgaacacttcaatggaatacattttgtggacaatgtcactttagaatctttcatctcagtgaaggattacacattctcaatacttccataattgcaggttgtgttcatttttttatatagtttttgtaatccaaagaatattttgctagatttgcacagatctccaattgaatttgcaatgaagaaataactcaaaaggaatatgaatagcatttaaataagtatacagctgtaagtaaccctgtcaccatggatgatccttttctctaggaatgtatttggattagagatgacaactacattttcgcatttttatgttgaagtcttttttaaaaaggctgtttacttttcagtagttaagaatacttgtttttctttttcttttttttttttttttaccttttattttttcgttaagcctctattgtttgtagaacactcttagaaacttggaaataaaatgtctttcccaactagtggagtcctttttcatttggagcacattgccttaaaagaagtcttaatttaaacggtccttccttattctaaagtaatcactgttttataccatctatgcagctaaaagaaggaacatgcttctgttcttttcctcaagtaatggttattgtttctagtcatcattcattcattgattcattcattaattcatcaaaatcttattttataaaccctgttccacttactggaggattcagaatgaatcttactaccttttctgacatcttttgataattcagccctgtaccaaagtatccaccttgttgtcttataatcacctatttacctatttgccctcctagaaaatgcaagaagatattttctctccttccaaattgaaggaagaacataaaagatataacaggaaggagatggtgagatatagagtgtgagcggagattaggccagctgtggcaattctggacagatcttgggtttagctaagttatttcttttaggcctgggtttctgggggtgacagggaagataaaagagtagtttatttgcacctcttggagaattgcttaaaaatatagagatcatggctctgtatgtcaggtggaaccaggtcaggagtatttgaaactgctcctgggtcattgtgacatatccttcacatctttttgagaaactttataagacaatgggggtgaatgggggctgggcagttggagtctctgagcagaagaggggcaaaatttatttggcaggcagtgtggaggacagattaggagcatataaacccagaggtgtgccccaggagggcttttgcaaaggtcaaaatgagatagaatgagggcctgaaataattcagtaatttggagatggagaagaggaaagacttctctgctcttgcactgccatcagcctggtctgggccatggtcatctctgacccggaagactgaccccacctcttggctcaccctctgcctcccaacctcctcttcacaaagaagccagagggatacttttaacacacaacccagatcacatgacttcgtaacttaaacctcttcactggcttcccaaagacttaaaatgaattctgatgcctttattttattgctttacatgaacagggccctgcgaacctctccagtgtcattccactccatcctcctttcagtgcacgatgctccagccacactggccatctttcggttcctgatacaaaaaaaaacacgttccttttccatggaaagcaggtcacccttgttattttgtatcgatgacaactctttaaacttattttgctttttggctttatgtatgtgtgtgggtgggtgggactgactgccccactagaatgtaagctccatgagggcagggaatcttgctttcttgtttaccattgtatactcagttctttacacagtgcctgaaacataacaggtacacaataaatatctattgaatgaaaaaaaata

SEQ ID NO: 113 - DNA, 3987 bp, Homo sapien
gtatgcactcattggcactggtctctakctcgagcggcgccagtgtgatggatgcgtggtcgcggcgaggtggacctcgttttaagaaactagcagatttgtatggttccaaagacacttttgatgacgattcttaacaataacgatacaaatttggccttaagaactgtgtctggcgttctcaagaatctagaagatgtgtaaacaggtatttttttaaatcaaggaaaggctcatttaaaacaggcaaagttttacagagaggatacatttaataaaactgcgaggacatcaaagtggtaaatactgtgaaataccttttctcacaaaaaggcaaatattgaagttgtttatcaacttcgctagaaaaaaaaaacacttggcatacaaaatatttaagtgaaggagaagtctaacgctgaactgacaatgaagggaaattgtttatgtgttatgaacatccaagtctttcttcttttttaagttgtcaaagaagcttccacaaaattagaaaggacaacagttctgagctgtaatttcgccttaaactctggacactctatatgtagtgcatttttaaacttgaaatatataatattcagccagcttaaacccatacaatgtatgtacaatacaatgtacaattatgtctcttgagcatcaatcttgttactgctgattcttgtaaatctttttgcttctactttcatcttaaactaatacgtgccagatataactgtcttgtttcagtgagagacgccctatttctatgtcatttttaatgtatctatttgtacaattttaaagttcttattttagtatacatataaatatcagtattctgacatgtaagaaaatgttacggcatcacacttatattttatgaacattgtactgttgctttaatatgagcttcaatataagaagcaatctttgaaataaaaaaagatttttttttaattctgggtttgattcttaacattgaaacaaacgttaagtatttctaatgatccatttatatttctaatttaattgtgatcttttaataaccctatttatgatctgttgttgtctgtctgctgcttttattgtttatttaaaatcaaatatgttttacaaatgttttttcagacaagattctgtaacatcatgtaaagcttttttgtacattcttggtgttaacctcctggcttctcttcacacacatcttctaaaaaagaaggatgtgaaagaactaggtcagtctatgactttgcaatatgtgttatatagtatgcatttatcttgtatatcagtaatttgatggttatgagagatgaatccatgagggaatggagctatcagaactctaatgttccaggtatacattctatgccccacactgagcactggggaactgggggactagagtcaaaaatataaatttgcccagactctaatgttattctattttttcttctgttgaacttaccaggctattgtaagactcttgatagttgaaactgcttatttttcctcctgtaattttaactaattgtaaaatgatgtggcattttatgttttaatgagaatgggcgattcatttaaaaaagctttgtttagaatatgcttggggccgtaagctcagaatgagggcagggaccattttggattctgagagtcgatgccatttggtccaggagtgtgtctacagtcccctgcattccagctagtttcttggggattgaaacttatgtgaagggcatttcacctgttcagttgggccaaaggtcaaaacgtagcaatacttggggaaagaccacataaagtcacactgcaagtgctttccctctttccccctacacacagggcacgtgctttttcttggattgcagacaatttttacagtttttttctgactttattgtgaaagtttgtttcaagcatttcttgatatcatgttatgtactatttttatgatttagtcaacatgcatacaaagaaatgttttttatgaagtgctcacttccattttactttgcattgaaatcaaattgggctgaacacttcaatggaatacattttgtggacaatgtcactttagaatctttcatctcagtgaaggattacacattctcaatacttccataattgcaggttgtgttcatttttttatatagtttttgtaatccaaagaatattttgctagatttgcacagatctccaattgaatttgcaatgaagaaataactcaaaaggaatatgaatagcatttaaataagtatacagctgtaagtaaccctgtcaccatggatgatccttttctctaggaatgtatttggattagagatgacaactacattttcgcatttttatgttgaagtcttttttaaaaaggctgtttacttttcagtagttaagaatacttgtttttctttttcttttttttttttttttaccttttattttttcgttaagcctctattgtttgtagaacactcttagaaacttggaaataaaatgtctttcccaactagtggagtcctttttcatttggagcacattgccttaaaagaagtcttaatttaaacggtccttccttattctaaagtaatcactgttttataccatctatgcagctaaaagaaggaacatgcttctgttcttttcctcaagtaatggttattgtttctagtcatcattcattcattgattcattcattaattcatcaaaatcttattttataaaccctgttccacttactggaggattcagaatgaatcttactaccttttctgacatcttttgataattcagccctgtaccaaagtatccaccttgttgtcttataatcacctatttacctatttgccctcctagaaaatgcaagaagatattttctctccttccaaattgaaggaagaacataaaagatataacaggaaggagatggtgagatatagagtgtgagcggagattaggccagctgtggcaattctggacagatcttgggtttagctaagttatttcttttaggcctgggtttctgggggtgacagggaagataaaagagtagtttatttgcacctcttggagaattgcttaaaaatatagagatcatggctctgtatgtcaggtggaaccaggtcaggagtatttgaaactgctcctgggtcattgtgacatatccttcacatctttttgagaaactttataagacaatgggggtgaatgggggctgggcagttggagtctctgagcagaagaggggcaaaatttatttggcaggcagtgtggaggacagattaggagcatataaacccagaggtgtgccccaggagggcttttgcaaaggtcaaaatgagatagaatgagggcctgaaataattcagtaatttggagatggagaagaggaaagacttctctgctcttgcactgccatcagcctggtctgggccatggtcatctctgacccggaagactgaccccacctcttggctcaccctctgcctcccaacctcctcttcacaaagaagccagagggatacttttaacacacaacccagatcacatgacttcgtaacttaaacctcttcactggcttcccaaagacttaaaatgaattctgatgcctttattttattgctttacatgaacagggccctgcgaacctctccagtgtcattccactccatcctcctttcagtgcacgatgctccagccacactggccatctttcggttcctgatacaaaaaaaaacacgttccttttccatggaaagcaggtcacccttgttattttgtatcgatgacaactctttaaacttattttgctttttggctttatgtatgtgtgtgggtgggtgggactgactgccccactagaatgtaagctccatgagggcagggaatcttgctttcttgtttaccattgtatactcagttctttacacagtgcctgaaacataacaggtacacaataaatatctattgaatgaaaaaaaata

SEQ ID NO: 114 - DNA, 2761 bp, Homo sapien
gaaattcttacaaaaactgaaagtgaaatgaggaagacagattgagcaatccaatcggagggtaaatgccagcaaacctactgtacagtaggggtagagatgcagaaaggcagaaaggagaaaattcaggataactctcctgaggggtgagccaagccctgccatgtagtgcacgcaggacatcaacaaacacagataacaggaaatgatccattccctgtggtcacttattctaaaggccccaaccttcaaagttcaagtagtgatatggatgactccacagaaagggagcagtcacgccttacttcttgccttaagaaaagagaagaaatgaaactgaaggagtgtgtttccatcctcccacggaaggaaagcccctctgtccgatcctccaaagacggaaagctgctggctgcaaccttgctgctggcactgctgtcttgctgcctcacggtggtgtctttctaccaggtggccgccctgcaaggggacctggccagcctccgggcagagctgcagggccaccacgcggagaagctgccagcaggagcaggagcccccaaggccggcctggaggaagctccagctgtcaccgcgggactgaaagtgagtttgcagcagctgcaagacgcaggcaagatcctgcctacactgctgcctctccctcgcctcagctgtctttctaataacttgaagtttttctgttcatagatctttgaaccaccagctccaggagaaggcaactccagtcagaacagcagaaataagcgtgccgttcagggtccagaagaaacagtcactcaagactgcttgcaactgattgcagacagtgaaacaccaactatacaaaaaggatcttacacatttgttccatggcttctcagctttaaaaggggaagtgccctagaagaaaaagagaataaaatattggtcaaagaaactggttacttttttatatatggtcaggttttatatactgataagacctacgccatgggacatctaattcagaggaagaaggtccatgtctttggggatgaattgagtctggtgactttgtttcgatgtattcaaaatatgcctgaaacactacccaataattcctgctattcagctggcattgcaaaactggaagaaggagatgaactccaacttgcaataccaagagaaaatgcacaaatatcactggatggagatgtcacattttttggtgcattgaaactgctgtgacctacttacaccatgtctgtagctattttcctccctttctctgtacctctaagaagaaagaatctaactgaaaataccaaaaaaaaaaaaaaaaaaaagtagttaccattgccttttctgtgagctatttgttttggtttgctgaaactagtccaaaacaggaaatttaacagacagccacagccaaagagtgtcatgtgaattacaagaaatagagcccatttagggaaagatagaactagaaaggcttttcattataattccatgttgaacaattgagtcatagcttcttatcttggaggaaggacacaattcaaaggggcagtaaggattttgtaaaacgtggcatccataatttactatggagcaagtgcccacatctctaggacattaagacatttatgagaaatctcaggattcatcttctgtttttatgttaaatgcactccctccttttcagttaacattataaaaagtaaaaaatgaaaattttagaaatcttgcattagacacatgaaaaaataactaaaagtttaaatttaaatatgaaacaattttgctgaaaatagtatccatatactatttaagtcttttatggttatttcaagtatacaatttctatctgtaatgtaatatattacccacacatttttttcacaggagagagagaatatcctcatttgtttatgctcatgtgtattttctatagtgaatttcagaaacttttaatatcaggtaatttcaatttatgcctataaagcattgattgaaaaataactagaattgtgcatatataacacataatctccaacagaagttactgaatacattcatactaatgtaatgtaatttccctttatttcttgctcttctgtttcaaactgctgctattgtagtttacatatcccaacctttaaaaatattcctcttattagctttatattcactttatagaagttgagttttaattaaaattcttggcatcctgaagtatgtcacatagcatgtgctccttataaatatgttgatatctcagaagacagcatcccggttttcattttataaagtaccatacttaagaatgctgtaatacttatcttttataacatgtttccttcgctttgcttgtcttttatgtcatcagttttaactgtttacttcatttaacagtttacatcattcaacagtttacttcattaaacagtaggtggaaaaatagatgccagtctatgaaaatcttcccatctatatcaaaatacttttcaaggatatacttttcaaaacaaacgatttaaattttatgtttaaaatataaactttagatttaaactttatttaaatatctggttcctatgattttgacttcagtaagttcaaataaaatatattttgcaattcatttttacattataatttaaaaagaagaagcgataagtggagtcagtttcaatgctaggtggggtggttaatgatttttctggtgttgctgctaatgtggattaacaaataaaaacattcattgccttttaaa

SEQ ID NO: 115 - DNA, 2879 bp, Homo sapien
gaaattcttacaaaaactgaaagtgaaatgaggaagacagattgagcaatccaatcggagggtaaatgccagcaaacctactgtacagtaggggtagagatgcagaaaggcagaaaggagaaaattcaggataactctcctgaggggtgagccaagccctgccatgtagtgcacgcaggacatcaacaaacacagataacaggaaatgatccattccctgtggtcacttattctaaaggccccaaccttcaaagttcaagtagtgatatggatgactccacagaaagggagcagtcacgccttacttcttgccttaagaaaagagaagaaatgaaactgaaggagtgtgtttccatcctcccacggaaggaaagcccctctgtccgatcctccaaagacggaaagctgctggctgcaaccttgctgctggcactgctgtcttgctgcctcacggtggtgtctttctaccaggtggccgccctgcaaggggacctggccagcctccgggcagagctgcagggccaccacgcggagaagctgccagcaggagcaggagcccccaaggccggcctggaggaagctccagctgtcaccgcgggactgaaagtgagtttgcagcagctgcaagacgcaggcaagatcctgcctacactgctgcctctccctcgcctcagctgtctttctaataacttgaagtttttctgttcatagatctttgaaccaccagctccaggagaaggcaactccagtcagaacagcagaaataagcgtgccgttcagggtccagaagaaacagtcactcaagactgcttgcaactgattgcagacagtgaaacaccaactatacaaaaaggctcccttctgttgccacatttgggccaaggaatggagagatttcttcgtctggaaacattttgccaaactcttcagatactctttcctctctgggaatcaaaggaaaatctctactagatcttacacatttgttccatggcttctcagctttaaaaggggaagtgccctagaagaaaaagagaataaaatattggtcaaagaaactggttacttttttatatatggtcaggttttatatactgataagacctacgccatgggacatctaattcagaggaagaaggtccatgtctttggggatgaattgagtctggtgactttgtttcgatgtattcaaaatatgcctgaaacactacccaataattcctgctattcagctggcattgcaaaactggaagaaggagatgaactccaacttgcaataccaagagaaaatgcacaaatatcactggatggagatgtcacattttttggtgcattgaaactgctgtgacctacttacaccatgtctgtagctattttcctccctttctctgtacctctaagaagaaagaatctaactgaaaataccaaaaaaaaaaaaaaaaaaaagtagttaccattgccttttctgtgagctatttgttttggtttgctgaaactagtccaaaacaggaaatttaacagacagccacagccaaagagtgtcatgtgaattacaagaaatagagcccatttagggaaagatagaactagaaaggcttttcattataattccatgttgaacaattgagtcatagcttcttatcttggaggaaggacacaattcaaaggggcagtaaggattttgtaaaacgtggcatccataatttactatggagcaagtgcccacatctctaggacattaagacatttatgagaaatctcaggattcatcttctgtttttatgttaaatgcactccctccttttcagttaacattataaaaagtaaaaaatgaaaattttagaaatcttgcattagacacatgaaaaaataactaaaagtttaaatttaaatatgaaacaattttgctgaaaatagtatccatatactatttaagtcttttatggttatttcaagtatacaatttctatctgtaatgtaatatattacccacacatttttttcacaggagagagagaatatcctcatttgtttatgctcatgtgtattttctatagtgaatttcagaaacttttaatatcaggtaatttcaatttatgcctataaagcattgattgaaaaataactagaattgtgcatatataacacataatctccaacagaagttactgaatacattcatactaatgtaatgtaatttccctttatttcttgctcttctgtttcaaactgctgctattgtagtttacatatcccaacctttaaaaatattcctcttattagctttatattcactttatagaagttgagttttaattaaaattcttggcatcctgaagtatgtcacatagcatgtgctccttataaatatgttgatatctcagaagacagcatcccggttttcattttataaagtaccatacttaagaatgctgtaatacttatcttttataacatgtttccttcgctttgcttgtcttttatgtcatcagttttaactgtttacttcatttaacagtttacatcattcaacagtttacttcattaaacagtaggtggaaaaatagatgccagtctatgaaaatcttcccatctatatcaaaatacttttcaaggatatacttttcaaaacaaacgatttaaattttatgtttaaaatataaactttagatttaaactttatttaaatatctggttcctatgattttgacttcagtaagttcaaataaaatatattttgcaattcatttttacattataatttaaaaagaagaagcgataagtggagtcagtttcaatgctaggtggggtggttaatgatttttctggtgttgctgctaatgtggattaacaaataaaaacattcattgccttttaaa

SEQ ID NO: 116 - DNA, 1075 bp, Homo sapien
agaaagattatgacaaccgaatggwcmaccattttatwgytgagttyargcgcacgcatwrraagracakcagtgagaacaagagagctgtaagacgcctccgtactgcttgtgaacgtgctaagcgtaccctctcttccagcacccaggccagtattgagatcgattctctctatgaaggaatcgacttctatacctccattacccgtgcccgatttgaagaactgaatgctgacctgttccgtggcaccctggacccagtagagaaagcccttcgagatgccaaactagacaagtcacagattcatgatattgtcctggttggtggttctactcgtatccccaagattcagaagcttctccaagacttcttcaatggaaaagaactgaataagagcatcaacccctgatgacagctgttgcttatgggtgcagctgtccaggcagccatcttgtctggagacaagtctgagaatgttcaagatttgctgctcttggatgtcactcctctttcccttggtattgaaactgctggtggagtcatgactgtcctcatcaagcgtaataccaccattcctaccaagcagacacagaccttcactacctattctgacaaccagcctggtgtgcttattcaggtttatgaaggcgagcgtgccatgacaaaggataacaacctgcttggcaagtttgaactcacaggcatacctcctgcaccccgaggtgttcctcagattgaagtcacttttgacattgatgccaatggtatactcaatgtctctgctgtggacaagagtacgggaaaagagaacaagattactatcactaatgacaagggccgtttgagcaaggaagacattgaacgtatggtccaggaagctgagaagtacaaagctgaagatgagaagcagagggacaaggtgtcatccaagaattcacttgagtcctatgccttcaacatgaaagcaactgttgaagatgagaacttcaggcagattacggtgaggcaacagagktctggcagkttatgaatatcactgctgtagrtagctccggaggaggatttgacatcaca

SEQ ID NO: 117 - DNA, 715 bp, Homo sapien
agagtagactcatatagcgaatgtgccctagatcatgctcgagcggcgcagtgtgatggatggtcgcgggcgagggggggtccagcatccggacaccacagcggcccttcgctccacgcagaaaaccacacttctcaaaccttcactcaacacttccttccccaaagccagaagatgcacaaggaggaacatgaggtggctgtgctgggggcaccccccagcaccatccttccaaggtccaccgtgatcaacatccacagcgagacctccgtgcccgaccatgtcgtctggtccctgttcaacaccctcttcttgaactggtgctgtctgggcttcatagcattcgcctactccgtgaagtctagggacaggaagatggttggcgacgtgaccggggcccaggcctatgcctccaccgccaagtgcctgaacatctgggccctgattctgggcatcctcatgaccattggattcatcctgttactggtattcggctctgtgacagtctaccatattatgttacagataatacaggaaaaacggggttactagtagccgcccatagcctgcaacctttgcactccactgtgcaatgctggccctgcacgctggggctgttgcccctgcccccttggtcctgcccctagatacagcagtttatacccacacacctgtctacagtgtcattcaataaagtgcacgtgcttgtgaaaaa

SEQ ID NO: 118 - DNA, 1377 bp, Homo sapien
cgttcctgggcctggagggctgctttggggcaggaaactttggccaccaggcctctgacctgcaccaggagacactgggaggtttagtccccaaacccgcacagagcaggactgcagcctgaggaaagagcaaggatttcaggagagaggcctgcgacaagtgaggtgagggcttttgggggattgtcctggcgcctggagtgygsrggcctggcaggrgccctgaacsgggacagtgaggtcctgyasytgctggcctggggtgtggagactcccaacacaggggaagtctccaggaccccacaccactaacaagatgagacttgtgctcctttgggctctagagaggaagcccctcttagccctcagcccctctttcctctctatcttaaagtaatttgatcctcaggaatttgttccgccctcatctggccccggccaaatcccgatttgacaaatgccaggaaaaggaaactgttgagaaaccgaaactactggggaaagggagggctcactgagaaccatcccagtaacccgaccgccgctggtcttcgctggacaccatgaatcacactgtccaaaccttcttctctcctgtcaacagtggccagccccccaactatgagatgcacaaggaggaacatgaggtggctgtgctgggggcaccccccagcaccatccttccaaggtccaccgtgatcaacatccacagcgagacctccgtgcccgaccatgtcgtctggtccctgttcaacaccctcttcttgaactggtgctgtctgggcttcatagcattcgcctactccgtgaagtctagggacaggaagatggttggcgacgtgaccggggcccaggcctatgcctccaccgccaagtgcctgaacatctgggccctgattctgggcatcctcatgaccattggattcatcctgttactggtattcggctctgtgacagtctaccatattatgttacagataatacaggaaaaacggggttactagtagccgcccatagcctgcaacctttgcactccactgtgcaatgctggccctgcacgctggggctgttgcccctgcccccttggtcctgcccctagatacagcagtttatacccacacacctgtctacagtgtcattcaataaagtgcacgtgcttgtgaaaaaaaaaamacacacacaacaacaaacaccgttgtaggcacagacgcactgaacaagagtcatagagaacacacaaggaatggcacccagcgcgcgcccacgaagagagcgacaaggacacacaggcggaacggagcgtgaacacccagaggaaaaacaccggagacacaacacaaccggggcagagagatatccacacccactagaacaacg

SEQ ID NO: 119 - DNA, 579 bp, Homo sapien
atcatcttggcgtggtctctaatgcatgctcgagcggcgcagtgtgatggatcgtggtcgcgggcgtggtggaagcaggacacctggaactgcggcaaagtaggagaagaaatggggaggactcgggtgggggaggacgtcccggctgggatgaagtctggtggtgggtcgtaagtttaggaggtgactgcatcctccagcatctcaactccgtctgtctactgtgtgagacttcggcggaccattaggaatgagatccgtgagatccttccatcttcttgaagtcgcctttagggtggctgcgaggtagagggttgggggttggtgggctgtcacggagcgactgtcgagatcgcctagtatgttctgtgaacacaaataaaattgatttactgtctggaaaaagaaaragaaaagaaaaaaaaacgctgtgcgggataactcagtgggtcattaggcgtgttcccgtggggtggacacttgtttttccgggctcacaatttccagcacaacatatgagcaccaacggggaaacgacgagggcagcggggggccagtggaagaagcgaacacacggca

SEQ ID NO: 120 - DNA, 1018 bp, Homo sapien
gcccttagcgtggtcgcggccgaggtaccgtgtcccgttcttagtgctcgaatgtcccaacctgaagctgaagaagccgccctggttgcacatgccgtcggccatgactgtgtatgctctggtggtggtgtcttacttcctcatcaccggaggaataatttatgatgttattgttgaacctccaagtgtcggttctatgactgatgaacatgggcatcagaggccagtagctttcttggcctacagagtaaatggacaatatattatggaaggacttgcatccagcttcctatttacaatgggaggtttaggtttcataatcctggaccgatcgaatgcaccaaatatcccaaaactcaatagattccttcttctgttcattggattcgtctgtgtcctattgagttttttcatggctagagtattcatgagaatgaaactgccgggctatctgatgggttagagtgcctttgagaagaaatcagtggatactggatttgctcctgtcaatgaagttttaaaggctgtaccaatcctctaatatgaaatgtggaaaagaatgaagagcagcagtaaaagaaatatctagtgaaaaaacaggaagcgtattgaagcttggactagaatttcttcttggtattaaagagacaagtttatcacagaattttttttcctgctggcctattgctataccaatgatgttgagtggcattttctttttagtttttcattaaaatatattccatatctacaactataatatcaaataaagtgattattttttacaaccctcttaacattttttggagatgacatttctgattttcagaaattaacataaaatccagaagcaagattccgtaagctgagaactctggacagttgatcagctttacctatggtgctttgcctttaactagagtgtgtgatggtagattatttcagatatgtatgtaaaactgtttcctgaacaataagatgtatgaacggagcagaaataaatactttttctaattaa

SEQ ID NO: 121 - DNA, 1041 bp, Homo sapien
acttgttagggagggcgggcctgtttccgggaggcgcgtggggcttgaggccgagaacggcccttgctgccaccaacatggagactttgtaccgtgtcccgttcttagtgctcgaatgtcccaacctgaagctgaagaagccgccctggttgcacatgccgtcggccatgactgtgaataatttatgatgttattgttgaacctccaagtgtcggttctatgactgatgaacatgggcatcagaggccagtagctttcttggcctacagagtaaatggacaatatattatggaaggacttgcatccagcttcctatttacaatgggaggtttaggtttcataatcctggaccgatcgaatgcaccaaatatcccaaaactcaatagattccttcttctgttcattggattcgtctgtgtcctattgagttttttcatggctagagtattcatgagaatgaaactgccgggctatctgatgggttagagtgcctttgagaagaaatcagtggatactggatttgctcctgtcaatgaagttttaaaggctgtaccaatcctctaatatgaaatgtggaaaagaatgaagagcagcagtaaaagaaatatctagtgaaaaaacaggaagcgtattgaagcttggactagaatttcttcttggtattaaagagacaagtttatcacagaattttttttcctgctggcctattgctataccaatgatgttgagtggcattttctttttagtttttcattaaaatatattccatatctacaactataatatcaaataaagtgattattttttacaaccctcttaacattttttggagatgacatttctgattttcagaaattaacataaaatccagaagcaagattccgtaagctgagaactctggacagttgatcagctttacctatggtgctttgcctttaactagagtgtgtgatggtagattatttcagatatgtatgtaaaactgtttcctgaacaataagatgtatgaacggagcagaaataaatactttttctaattaa

SEQ ID NO: 122 - DNA, 916 bp, Homo sapien
acttgttagggagggcgggcctgtttccgggaggcgcgtggggcttgaggccgagaacggcccttgctgccaccaacatggagactttgtaccgtgtcccgttcttagtgctcgaatgtcccaacctgaagctgaagaagccgccctggttgcacatgccgtcggccatgactgtgtatgctctggtggtggtgtcttacttcctcatcaccggaggaataatttatgatgttattgttgaacctccaagtgtcggttctatgactgatgaacatgggcatcagaggccagtagctttcttggcctacaggggctatctgatgggttagagtgcctttgagaagaaatcagtggatactggatttgctcctgtcaatgaagttttaaaggctgtaccaatcctctaatatgaaatgtggaaaagaatgaagagcagcagtaaaagaaatatctagtgaaaaaacaggaagcgtattgaagcttggactagaatttcttcttggtattaaagagacaagtttatcacagaattttttttcctgctggcctattgctataccaatgatgttgagtggcattttctttttagtttttcattaaaatatattccatatctacaactataatatcaaataaagtgattattttttacaaccctcttaacattttttggagatgacatttctgattttcagaaattaacataaaatccagaagcaagattccgtaagctgagaactctggacagttgatcagctttacctatggtgctttgcctttaactagagtgtgtgatggtagattatttcagatatgtatgtaaaactgtttcctgaacaataagatgtatgaacggagcagaaataaatactttttctaattaaaaaaaaagaaggggcgcgccaagataccccag

SEQ ID NO: 123 - DNA, 1018 bp, Homo sapien; identical to SEQ ID NO: 120

SEQ ID NO: 124 - DNA, 916 bp, Homo sapien; identical to SEQ ID NO: 122

SEQ ID NO: 125 - DNA, 762 bp, Homo sapien
ctgttttgagttttgccctggggcttgaatgagtcccaaagagtcgttcggatggtgggagctgcctaggaggcagtaaatccagtcacagtgcctgggaggggcccatccttccaaatgtaaatccagtcgcggtgtgaccgagctggctaacaggcttgtctgcctggttttcctcctacacgtggacattattctcctgatcctcctacctggtccaccccagggctaccggaaggtaaaatcttcacctgaaccaattatgagcagtctccttactgaaggtacctgcccggcgaccgctcgagtcgcggcgagggaggaaggtgggtctgaatctagcaccatgacggaactagagacagccatgggcatgatcatagacgtcttttcccgatattcgggcagcgagggcagcacgcagaccctgaccaagggggagctcaaggtgctgatggagaaggagctaccaggcttcctgcagagtggaaaagacaaggatgccgtggataaattgctcaaggacctggacgccaatggagatgcccaggtggacttcagtgagttcatcgtgttcgtggctgcaatcacgtctgcctgtcacaagtactttgagaaggcaggactcaaatgatgccctggagatgtcacagattcctggcagagccatggtcccaggcttcccaaaagtgtttgttggcaattattcccctaggctgagcctgctcatgtacctctgattaataaatgcttatgaaatga

SEQ ID NO: 126 - DNA, 563 bp, Homo sapien
tgccgaatccgtcgtgcaagacatgagagtcccgggttgaggaagggtacaagtctcttaagatccaacactcaaaagggccggttcttccaagggtgccgaattgtgggaagtggaccaaaatggctgatggcccyttaaaaacatcayytttwacaacgtcarggatttagcwtaaaaagratyggttaaaagctttggttyctagwaaaggtwagtgtgtgtggtttttttaagaagctgttttgctaaattatttttacttggaatgtttcaaacagatttcaggctgcaaacttgttttataatcgtttgcttctccaagtgaagctcagaaatacctaaaaatagctgtaacgttcgcgttaggaaagatggtgtttattccagtttgcatttttatggtgaaataaaatccttttccaatgaactaaaaaaaaaaaaaaagggcggccgctcgcgatctagaactagttttttttaatttacaaaaatataaaatatgaagacataaacccagttgccatctgcgtgacaataaaacattaatgctaacacttttt

SEQ ID NO: 127 - DNA, 757 bp, Homo sapien
ccctgcggcccccgcctgccctttaaaagagcggggcctgcgccggccgcgccacaccgcggggaccaggaggcacgctggttttccggggccgctccatcgcgccttcctcctgcgcctcgcttctccggtccagccgccatcttcctttccgcacaggggccgccgagcggggccatgcagccaacgctgcttctcagcctcctgggagccgtggggctggcggctgtcaattccatgccagtggataacaggaaccacaatgaaggaatggtgactcgctgcatcattgaggtcctctcaaatgccttgtcgaagtccagcgctccacccatcacccctgagtgccgccaagtcctgaagacgaaaaaaagaactcgaaaacttggctgcaatggatttggaactacagaagatagctgagaaattcagccaaaggggctgactgtcattggagcggtgggcactgttaagaagcagccatcacatgatctgtttttcaccacttcactgaaagacaccatttatctacccaagggcagaaagtagaacttactattcattaaatgtttgacacaattggaattgtctttaatttctgtcagaatgctattgaaaatgtgaattgcatgacttgtagcatattcttttctgcaaaatagacatattaacatgcttatgacaatgactgtgctactgtctttggaaaaatgtttgtctcagttggaaataataaaagattcacctgagaccaaaa

SEQ ID NO: 128 - DNA, 805 bp, Homo sapien
gagctcgcgcgcctgcaggtgagaaaattgagacggagctaagagatatctgcaatcaatgtactgtctctcttcggaaagttctmgatcccaatgcttcacaagcagagagcaaagtcttctatttgaaaatgaaaggagattactaccgttacttggctgaggttgccgctggtgatgaaccagaaagggattggccgatccgttcaacacaaagcatacccaaagggaaagcttttgaaatcagcraaaaggaaatgcaaccaacacatcctatcagactgggtctggcccttaacttctctgtgttctattatgagattctgaactccccagagaaagcctggtctscttgcaaagacagcttttgatgaagccattgctgaacttgatacattaagtgaagagtcatacaaagacagcacgctaataatgcaattactgagagacaacttgacattgtggacatcggatacccaaggagacgaagctgaagcaggagaaggaggggmaaattmaccggcttccaassttttgtctgcctcattctaaaattkacacagtagaccatkttgtcatccatgctgtcccacaaatagtwtttwgtwtacgatttatgacaggtttatgtyacttctattygaatttctatatttgcccatgtggktgttatgtgttaatattaggggagtagagccagttaacatttagggagttatctgttttcatcttgaggtggccatatggggatgtggaatttttatacaagttataagtgtttggcatagtacctgcccgggcggcc

SEQ ID NO: 129 - DNA, 607 bp, Homo sapien
  misc_feature (15)..(15): n=a, c, g or t
aggggcgaggaagantgagggccacctgcttatctgggaggtgttgggcgcggacagtcgagatgtcagagaaaaagcagccggtagacttaggtctgttagaggaagacgacgagtttgaagagttccctgccgaagactgggctggcttagatgaagatgaagatgcacatgtctgggaggataattgggatgatgacaatgtagaggatgacttctctaatcagttacgagctgaactagagaaacatggttataagatggagacttcatagcatccagaagaagtgttgaagtaacctaaacttgacctgcttaatacattctagggcagagaacccaggatgggacactaaaaaaatgtgtttatttcattatctgcttggatttatttgtgtttttgtaacacaaaaaataaatgttttgatataaaaaaaaaaaaaaaaaaaaaaaaaaaaaaaaaaaaaatatttatttctttttattattctttgtcccctctgtttgtttgtcggtattctcaaactatgagtgttttatgtttttctcgcgctggtttggttatatctgtcggcgtcccctttctcccgccggcgctaacatttct

SEQ ID NO: 130 - DNA, 775 bp, Homo sapien
tttagcgtggtcgcggccgaggtgcggtagtgacggtggcgtttccttgaggaagagtgagggttccaacttttctgcttatctgggaggtgttgggcgcggacagtcgagatgtcagagaaaaagcagccggtagacttaggtctgttagaggaagacgacgagtttgaagagttccctgccgaagactgggctggcttagatgaagatgaagatgcacatgtctgggaggataattgggatgatgacaatgtagaggatgacttctctaatcagttacgagctgaactagagaaacatggttataagatggagacttcatagcatccagaagaagtgttgaagtaacctaaacttgacctgcttaatacattctagggcagagaacccaggatgggacactaaaaaaatgtgtttatttcattatctgcttggatttatttgtgtttttgtaacacaaaaaataaatgttttgatataaaaaaaaaaaaaaaaaaaacacccgaaactagttctctctctctctctttcaccccgggttgaggcactggcgggtatgggggggcataagcttggtccacaaccagctcaatcagcgcactctgacctgggtggaaagctcggggggaccccagggactcactaccacgcaggagcgggaagaagcagatgtacccaggggattcctccaacagcagagggctccaggaacagcacgagccccaccattttacaccaaacggtctgactgggggccaccgtgccgaacagagac

SEQ ID NO: 131 - DNA, 3018 bp, Homo sapien
gtggcaacggccgcccgggcaggctccaggctgtggaacctttgttctttcactctttgcaataaatcttgctgctgctcactctttgggtccacactgcctttatgagctgtaacactcactgggaatgtctgcagcttcactcctgaagccagcgagaccacgaacccaccaggaggaacaaacaactccagacgcgcagccttaagagctgtaacactcaccgcgaaggtctgcagcttcactcctgagccagccagaccacgaacccaccagaaggaagaaactccaaacacatccgaacatcagaaggagcaaactcgtgacacgccacctttaagaaccgtgacactcaacgctagggtccgcggcttcattcttgaagtcagtgagaccaagaacccaccaattccggacacgctaattgttgtagatcatcacttcaaggtgcccatatctttctagtggaaaaattattctggcctccgctgcatacaaatcaggcaaccagaattctacatatataaggcaaagtaacatcctagacatggctttagagatccacatgtcagaccccatgtgcctcatcgagaactttaatgagcagctgaaggttaatcaggaagctttggagatcctgtctgccattacgcaacctgtagttgtggtagcgattgtgggcctctatcgcactggcaaatcctacctgatgaacaagctggctgggaagaacaagggcttctctgttgcatctacggtgcagtctcacaccaagggaatttggatatggtgtgtgcctcatcccaactggccaaatcacacattagttctgcttgacaccgagggcctgggagatgtagagaaggctgacaacaagaatgatatccagatctttgcactggcactcttactgagcagcacctttgtgtacaatactgtgaacaaaattgatcagggtgctatcgacctactgcacaatgtgacagaactgacagatctgctcaaggcaagaaactcacccgaccttgacagggttgaagatcctgctgactctgcgagcttcttcccagacttagtgtggactctgagagatttctgcttaggcctggaaatagatgggcaacttgtcacaccagatgaatacctggagaattccctaaggccaaagcaaggtagtgatcaaagagttcaaaatttcaatttgccccgtctgtgtatacagaagttctttccaaaaaagaaatgctttatctttgacttacctgctcaccaaaaaaagcttgcccaacttgaaacactgcctgatgatgagctagagcctgaatttgtgcaacaagtgacagaattctgttcctacatctttagccattctatgaccaagactcttccaggtggcatcatggtcaatggatctcgtctaaagaacctggtgctgacctatgtcaatgccatcagcagtggggatctgccttgcatagagaatgcagtcctggccttggctcagagagagaactcagctgcagtgcaaaaggccattgcccactatgaccagcaaatgggccagaaagtgcagctgcccatggaaaccctccaggagctgctggacctgcacaggaccagtgagagggaggccattgaagtcttcatgaaaaactctttcaaggatgtagaccaaagtttccagaaagaattggagactctactagatgcaaaacagaatgacatttgtaaacggaacctggaagcatcctcggattattgctcggctttacttaaggatatttttggtcctctagaagaagcagtgaagcagggaatttattctaagccaggaggccataatctcttcattcagaaaacagaagaactgaaggcaaagtactatcgggagcctcggaaaggaatacaggctgaagaagttctgcagaaatatttaaagtccaaggagtctgtgagtcatgcaatattacagactgaccaggctctcacagagacggaaaaaaagaagaaaggtgagaagaaagtggaaattatgcaagatagaaagaaatctataaattttaaataaatttggcctggccctcatgggatgttaaactagagcaagaatggcaaagatgcttcttagctcctcaagcatatctgactggcatgatcctgcattgtggttacctggaagggaaaaacaacccctgggaattttatccaggaagttggaacaatcacaaacaaaagtgggaggcagaaggaagaggcacattaatcctagagaagattatctttttctcctcagaggcacaagtgaaagcagaagctgaaaaggctgaagcgcaaaggttggcggcgattcaaaggcagaacgagcaaatgatgcaggagagggagagactccatcaggaacaagtgagacaaatggagatagccaaacaaaattggctggcagagcaacagaaaatgcaggaacaacagatgcaggaacaggctgcacagctcagcacaacattccaagctcaaaatagaagccttctcagtgagctccagcacgcccagaggactgttaataacgatgatccatgtgttttactctaaagtgctaaatatgggagtttcctttttttactctttgtcactgatgacacaacagaaaagaaactgtagaccttgggacaatcaacatttaaataaactttataattattttttcaaactttcatatagagttataagattatgatgctggtatctggtaaaatgtacatcccagtagtccaatagtttaaatgtttattgcttcctttaagagattataaattgtataagggacattgtatcactgccttcatttatgcgtgatattgggatggtttcatcaggagatgctttcccttgcatctcaatgtcatctgtctaatttctcataaggggattatgttacctagagcagggcttcccaaccctcaggccatagactagctctgatctgtggcctcttaggaacccggccacacagcaggaggt

SEQ ID NO: 132 - DNA, 1896 bp, Homo sapien
ttatagtttggcagtgctgcctaatgctgctcgagcggcgcagtgtgatggatcggccgcccgggcagggcgtggtcgcggccgaggtacaatactgtgaacaaaattgatcagggtgctatcgacctactgcacaatgtgacagaactgacagatctgctcaaggcaagaaactcacccgaccttgacagggttgaagatcctgctgactctgcgagcttcttcccagacttagtgtggactctgagagatttctgcttaggcctggaaatagatgggcaacttgtcacaccagatgaatacctggagaattccctaaggccaaagcaaggtagtgatcaaagagttcaaaatttcaatttgccccgtctgtgtatacagaagttctttccaaaaaagaaatgctttatctttgacttacctgctcaccaaaaaaagcttgcccaacttgaaacactgcctgatgatgagctagagcctgaatttgtgcaacaagtgacagaattctgttcctacatctttagccattctatgaccaagactcttccaggtggcatcatggtcaatggatctcgtctaaagaacctggtgctgacctatgtcaatgccatcagcagtggggatctgccttgcatagagaatgcagtcctggccttggctcagagagagaactcagctgcagtgcaaaaggccattgcccactatgaccagcaaatgggccagaaagtgcagctgcccatggaaaccctccaggagctgctggacctgcacaggaccagtgagagggaggccattgaagtcttcatgaaaaactctttcaaggatgtagaccaaagtttccagaaagaattggagactctactagatgcaaaacagaatgacatttgtaaacggaacctggaagcatcctcggattattgctcggctttacttaaggatatttttggtcctctagaagaagcagtgaagcagggaatttattctaagccaggaggccataatctcttcattcagaaaacagaagaactgaaggcaaagtactatcgggagcctcggaaaggaatacaggctgaagaagttctgcagaaatatttaaagtccaaggagtctgtgagtcatgcaatattacagactgaccaggctctcacagagacggaaaaaaagaagaaagaggcacaagtgaaagcagaagctgaaaaggctgaagcgcaaaggttggcggcgattcaaaggcagaacgagcaaatgatgcaggagagggagagactccatcaggaacaagtgagacaaatggagatagccaaacaaaattggctggcagagcaacagaaaatgcaggaacaacagatgcaggaacaggctgcacagctcagcacaacattccaagctcaaaatagaagccttctcagtgagctccagcacgcccagaggactgttaataacgatgatccatgtgttttactctaaagtgctaaatatgggagtttcctttttttactctttgtcactgatgacacaacagaaaagaaactgtagaccttgggacaatcaacatttaaataaactttataattattttttcaaactttcatatagagttataagattatgatgctggtatctggtaaaatgtacatcccagtagtccaatagtttaaatgtttattgcttcctttaagagattataaattgtataagggacattgtatcactgccttcatttatgcgtgatattgggatggtttcatcaggagatgctttcccttgcatctcaatgtcatctgtctaatttctcataaggggattatgttacctagagcagggcttcccaaccctcaggccatagactagctctgatctgtggcctcttaggaacccggccacacagcaggaggt

SEQ ID NO: 133 - DNA, 2919 bp, Homo sapien
tgggtgtggctctttgtgtcagagaaagttgtgacaactttgagtgtaatatttgtgcctgtgtgtggacggtgtttgggtggctgtgtgtgccacgggatactgcctgcttgctaagtgctggtgtgtgtcacaccatgtgtgtggtgtctgggtgtggctgtgggtttcagagcttgctgggagttgtgagtcactctgtgtaggttgtgttgtgtgccctggtgtgttagtctccgtcttgggctgtggagtgtccttcggtgtctgggtgtggtgagtagaggtgtgtgtcacaaagtacagaccattgtgtgtgacaaagcccatcgtgtgtctgtgtgtgtctttatccacgtggatggacgtctctttcttgctctgccccaagacacaccctagcccctccttattctcaaaagggggagctggggagcctccccctaccctggggcctcccctgcccctccccgccctgcctggccgtcaccactccccagagggcacagggctctgctgtgcctcagagcaaaagtcccagagccagcagagcaggctgacgacctgcaagccacagtggctgccctgtgcgtgctgcgaggtgggggaccctgggcaggaagctggctgagccccaagaccccgggggccatgggcggggatctggtgcttggcctgggggccttgagacgccgaaagcgcttgctggagcaggagaagtctctggccggctgggcactggtgctggcaggaactggcattggactcatggtgctgcatgcagagatgctgtggttcggggggtgctcgtgggcgctctacctgttcctggttaaatgcacgatcagcatttccaccttcttactcctctgcctcatcgtggcctttcatgccaaagaggtccagctgttcatgaccgacaacgggctgcgggactggcgcgtggcgctgaccgggcggcaggcggcgcagatcgtgctggagctggtggtgtgtgggctgcacccggcgcccgtgcggggcccgccgtgcgtgcaggatttaggggcgccgctgacctccccgcagccctggccgggattcctgggccaaggggaagcgctgctgtccctggccatgctgctgcgtctctacctggtgccccgcgccgtgctcctgcgcagcggcgtcctgctcaacgcttcctaccgcagcatcggcgctctcaatcaagtccgcttccgccactggttcgtggccaagctttacatgaacacgcaccctggccgcctgctgctcggcctcacgcttggcctctggctgaccaccgcctgggtgctgtccgtggccgagaggcaggctgttaatgccactgggcacctttcagacacactttggctgatccccatcacattcctgaccatcggctatggtgacgtggtgccgggcaccatgtggggcaagatcgtctgcctgtgcactggagtcatgggtgtctgctgcacagccctgctggtggccgtggtggcccggaagctggagtttaacaaggcagagaagcacgtgcacaacttcatgatggatatccagtataccaaagagatgaaggagtccgctgcccgagtgctacaagaagcctggatgttctacaaacatactcgcaggaaggagtctcatgctgcccgcaggcatcagcgcaagctgctggccgccatcaacgcgagggccgctttgtatgcacacgtgtccatgtgcacccatgtccaagtcacctctctgcacggctgtgtgtgtgcatgtccatgcctgtccaggtcaggacacccaggtgtggtctcactcaacatccaggtctcacctggatctgaccgtgcatgactctatgtgtctgtgctggtttgtctccgcatatctcggtgtgtctgcggacctgggtacctgggtttctactggggatgggggctcgtggggaggcagggtgcatcccctcccactctttcagctcttcgacaactttgtttctttgttttgtttcttcatgtgcctctcctcccttcattcctcccctgagctacagctacattcagggaccaggcttgtaaaactgactccccacttcttcccacaggttccgccaggtgcggctgaaacaccggaagctccgggaacaagtgaactccatggtggacatctccaagatgcacatgatcctgtatgacctgcagcagaatctgagcagctcacaccgggccctggagaaacagattgacacgctggcggggaagctggatgccctgactgagctgcttagcactgccctggggccgaggcagcttccagaacccagccagcagtccaagtagctggacccacgaggaggaaccaggctactttccccagtactgaggtggtggacatcgtctctgccactcctgacccagccctgaacaaagcacctcaagtgcaaggaccaaagggggccctggcttggagtgggttggcttgctgatggctgctggaggggacgctggctaaagtgggtaggccttggcccacctgaggccccaggtgggaacatggtcacccccactctgcataccctcatcaaaaacactctcactatgctgctatggacgacctccagctctcagttacaagtgcaggcgactggaggcaggactcctgggtccctgggaaagagggtactaggggcccggatccaggattctgggaggcttcagttaccgctggccgagctgaagaactgggtatgaggctggggcggggctggaggtggcgccccctggtgggacaacaaagaggacaccatttttccagagctgcagagagcacctggtggggaggaagaagtgtaactcaccagcctctgctcttatctttgtaataaatgttaaagccagaaaaaaaaaattctctcta

SEQ ID NO: 134 - DNA, 1451 bp, Homo sapien
tgcctgtttcctcagctgtaagacaggaacaggattcccactccctgtggcttttgggaggattttaaaccatatagggaaacacctgggcaggtagctgggaagtggtaggtggtcaatacatggtaacagttattgtcgagggtaatcctcagaggaccataaggatgtggtcaatattggttccattgccttacgctatggagtaggtgggggtcgaccccagccccgacacctctgatcctctcctcccacccagatgcacatgatcctgtatgacctgcagcagaatctgagcagctcacaccgggccctggagaaacagattgacacgctggcggggaagctggatgccctgactgagctgcttagcactgccctggggccgaggcagcttccagaacccagccagcagtccaagtagctggtgagggggctgggacttgggcaggaaggcatcctggaggaagggttcctgtggccagcaccctatgtggctaagggggcgggggatggctgggagacaaggccgccttttctcatcagctctggcactgtctggaggaaaggactcagttcggggctggactggcagtgaaggaagatggtgtaccctctccccttcactgacccttgatggccttctccctctttgcttggtctctctctctctctctgcctgtcctgggcacattgtctggctgtccatccaatgtctctgtctaaatgccctcctgccccctggcctcggggcccggaaacacctgccccctgtctcccacttctgcccaccggtttctgtctgcacctcggtgtgtcccactctcactctccctcttcctggcctgcctctccatcagtctctctgtctctccaggacccacgaggaggaaccaggctactttccccagtactgaggtggtggacatcgtctctgccactcctgacccagccctgaacaaagcacctcaagtgcaaggaccaaagggggccctggcttggagtgggttggcttgctgatggctgctggaggggacgctggctaaagtgggtaggccttggcccacctgaggccccaggtgggaacatggtcacccccactctgcataccctcatcaaaaacactctcactatgctgctatggacgacctccagctctcagttacaagtgcaggcgactggaggcaggactcctgggtccctgggaaagagggtactaggggcccggatccaggattctgggaggcttcagttaccgctggccgagctgaagaactgggtatgaggctggggcggggctggaggtggcgccccctggtgggacaacaaagaggacaccatttttccagagctgcagagagcacctggtggggaggaagaagtgtaactcaccagcctctgctcttatctttgtaataaatgttaaagccagaaaaaaaaaattctctcta

SEQ ID NO: 135 - DNA, 2512 bp, Homo sapien
tgggtgtggctctttgtgtcagagaaagttgtgacaactttgagtgtaatatttgtgcctgtgtgtggacggtgtttgggtggctgtgtgtgccacgggatactgcctgcttgctaagtgctggtgtgtgtcacaccatgtgtgtggtgtctgggtgtggctgtgggtttcagagcttgctgggagttgtgagtcactctgtgtaggttgtgttgtgtgccctggtgtgttagtctccgtcttgggctgtggagtgtccttcggtgtctgggtgtggtgagtagaggtgtgtgtcacaaagtacagaccattgtgtgtgacaaagcccatcgtgtgtctgtgtgtgtctttatccacgtggatggacgtctctttcttgctctgccccaagacacaccctagcccctccttattctcaaaagggggagctggggagcctccccctaccctggggcctcccctgcccctccccgccctgcctggccgtcaccactccccagagggcacagggctctgctgtgcctcagagcaaaagtcccagagccagcagagcaggctgacgacctgcaagccacagtggctgccctgtgcgtgctgcgaggtgggggaccctgggcaggaagctggctgagccccaagaccccgggggccatgggcggggatctggtgcttggcctgggggccttgagacgccgaaagcgcttgctggagcaggagaagtctctggccggctgggcactggtgctggcaggaactggcattggactcatggtgctgcatgcagagatgctgtggttcggggggtgctcgtgggcgctctacctgttcctggttaaatgcacgatcagcatttccaccttcttactcctctgcctcatcgtggcctttcatgccaaagaggtccagctgttcatgaccgacaacgggctgcgggactggcgcgtggcgctgaccgggcggcaggcggcgcagatcgtgctggagctggtggtgtgtgggctgcacccggcgcccgtgcggggcccgccgtgcgtgcaggatttaggggcgccgctgacctccccgcagccctggccgggattcctgggccaaggggaagcgctgctgtccctggccatgctgctgcgtctctacctggtgccccgcgccgtgctcctgcgcagcggcgtcctgctcaacgcttcctaccgcagcatcggcgctctcaatcaagtccgcttccgccactggttcgtggccaagctttacatgaacacgcaccctggccgcctgctgctcggcctcacgcttggcctctggctgaccaccgcctgggtgctgtccgtggccgagaggcaggctgttaatgccactgggcacctttcagacacactttggctgatccccatcacattcctgaccatcggctatggtgacgtggtgccgggcaccatgtggggcaagatcgtctgcctgtgcactggagtcatgggtgtctgctgcacagccctgctggtggccgtggtggcccggaagctggagtttaacaaggcagagaagcacgtgcacaacttcatgatggatatccagtataccaaagagatgaaggagtccgctgcccgagtgctacaagaagcctggatgttctacaaacatactcgcaggaaggagtctcatgctgcccgcaggcatcagcgcaagctgctggccgccatcaacgcgttccgccaggtgcggctgaaacaccggaagctccgggaacaagtgaactccatggtggacatctccaagatgcacatgatcctgtatgacctgcagcagaatctgagcagctcacaccgggccctggagaaacagattgacacgctggcggggaagctggatgccctgactgagctgcttagcactgccctggggccgaggcagcttccagaacccagccagcagtccaagtagctggacccacgaggaggaaccaggctactttccccagtactgaggtggtggacatcgtctctgccactcctgacccagccctgaacaaagcacctcaagtgcaaggaccaaagggggccctggcttggagtgggttggcttgctgatggctgctggaggggacgctggctaaagtgggtaggccttggcccacctgaggccccaggtgggaacatggtcacccccactctgcataccctcatcaaaaacactctcactatgctgctatggacgacctccagctctcagttacaagtgcaggcgactggaggcaggactcctgggtccctgggaaagagggtactaggggcccggatccaggattctgggaggcttcagttaccgctggccgagctgaagaactgggtatgaggctggggcggggctggaggtggcgccccctggtgggacaacaaagaggacaccatttttccagagctgcagagagcacctggtggggaggaagaagtgtaactcaccagcctctgctcttatctttgtaataaatgttaaagccagaaaaaaaaaattctctcta

SEQ ID NO: 136 - DNA, 519 bp, Homo sapien
tgagggaatattactactatgggccaattggttcatctagatgcatgctcgagcggcgcagtgtgatggatgtggtcgcggcgaggtgaaagcaatgatcgagactaagacgggtataatccctgagacccagattgtgacttgcaatggaaagagactggaagatgggaagatgatggcagattacggcatcagaaagggcaacttactcttcctggcatcttattgtattggagggtgaccaccctggggatggggtgttggcaggggtcaaaaagcttatttcttttaatctcttactcaacgaacacatcttctgatgatttcccaaaattaatgagaatgagatgagtagagtaagatttgggtgggatgggtaggatgaagtatattgcccaactctatgtttctttgattctaacacaattaattaagtgacatgatttttactaatgtattactgagactagtaaataaatttttaaggcaaaatagagcattcaaagccagcttggaatt

SEQ ID NO: 137 - DNA, 3696 bp, Homo sapien
tacggggaaattttgccaaggttacccaaggttttttgtttgttgtttgttgtggaataaargaagttttattctcaaaatataaaaaaaacaaccccacacaccaagggactaagatgatgttatttcacagcacttgcttgcctcagtctttacgaagaacacaattccaaactaatggacaagttcctccctgtgctctaggtcattcaaaggaggcaagctcctttgtcaaatcaggagctccatcagctgatcaggagcccagatgccagggtggattttctcagtgggatctagtattgctagaagagccttccttacatggcagaaacaggcacatgggcctcttcccttagaatgcatctgtctcacatgcttggggactgctgtgcaggaacacctggtgtggcctggcggctgggaaggaacaacctgtaacatagcccgaaacagtagctgcctgcccaacccctgccataatgggggcacatgtgtggtcaacggcgagtcctttacgtgcgtctgcaaggaaggctgggaggggcccatctgtgctcagaataccaatgactgcagccctcatccctgttacaacagcggcacctgtgtggatggagacaactggtaccggtgcgaatgtgccccgggttttgctgggcccgactgcagaataaacatcaatgaatgccagtcttcaccttgtgcctttggagcgacctgtgtggatgagatcaatggctaccggtgtgtctgccctccagggcacagtggtgccaagtgccaggaagtttcagggagaccttgcatcaccatggggagtgtgataccagatggggccaaatgggatgatgactgtaatacctgccagtgcctgaatggacggatcgcctgctcaaaggtctggtgtggccctcgaccttgcctgctccacaaagggcacagcgagtgccccagcgggcagagctgcatccccatcctggacgaccagtgcttcgtccacccctgcactggtgtgggcgagtgtcggtcttccagtctccagccggtgaagacaaagtgcacctctgactcctattaccaggataactgtgcgaacatcacatttacctttaacaaggagatgatgtcaccaggtcttactacggagcacatttgcagtgaattgaggaatttgaatattttgaagaatgtttccgctgaatattcaatctacatcgcttgcgagccttccccttcagcgaacaatgaaatacatgtggccatttctgctgaagatatacgggatgatgggaacccgatcaaggaaatcactgacaaaataatcgatcttgttagtaaacgtgatggaaacagctcgctgattgctgccgttgcagaagtaagagttcagaggcggcctctgaagaacagaacagatttccttgttcccttgctgagctctgtcttaactgtggcttggatctgttgcttggtgacggccttctactggtgcctgcggaagcggcggaagccgggcagccacacacactcagcctctgaggacaacaccaccaacaacgtgcgggagcagctgaaccagatcaaaaaccccattgagaaacatggggccaacacggtccccatcaaggattacgagaacaagaactccaaaatgtctaaaataaggacacacaattctgaagtagaagaggacgacatggacaaacaccagcagaaagcccggtttgccaagcagccggcgtacacgctggtagacagagaagagaagccccccaacggcacgccgacaaaacacccaaactggacaaacaaacaggacaacagagacttggaaagtgcccagagcttaaaccgaatggagtacatcgtatagcagaccgcgggcactgccgccgctaggtagagtctgagggcttgtagttctttaaactgtcgtgtcatactcgagtctgaggccgttgctgacttagaatccctgtgttaatttaagttttgacaagctggcttacactggcaatggtagtttctgtggttggctgggaaatcgagtgccgcatctcacagctatgcaaaaagctagtcaacagtaccctggttgtgtgtccccttgcagccgacacggtctcggatcaggctcccaggagcctgcccagccccctggtctttgagctcccacttctgccagatgtcctaatggtgatgcagtcttagatcatagttttatttatatttattgactcttgagttgtttttgtatattggttttatgatgacgtacaagtagttctgtatttgaaagtgcctttgcagctcagaaccacagcaacgatcacaaatgactttattatttattttttttaattgtatttttgttgttgggggaggggagactttgatgtcagcagttgctggtaaaatgaagaatttaaagaaaaaaatgtcaaaagtagaactttgtatagttatgtaaataattcttttttattaatcactgtgtatatttgatttattaacttaataatcaagagccttaaaacatcattcctttttatttatatgtatgtgtttagaattgaaggtttttgatagcattgtaagcgtatggctttatttttttgaactcttctcattacttgttgcctataagccaaaattaaggtgtttgaaaatagtttattttaaaacaataggatgggcttctgtgcccagaatactgatggaatttttttgtacgacgtcagatgtttaaaacaccttctatagcatcacttaaaacacgttttaaggactgactgaggcagtttgaggattagtttagaacaggtttttttgtttgtttgttttttgtttttctgctttagacttgaaaagagacaggcaggtgatctgctgcagagcagtaagggaacaagttgagctatgacttaacatagccaaaatgtgagtggttgaatatgattaaaaatatcaaattaattgtgtgaacttggaagcacaccaatcttactttgtaaattctgatttcttttcaccattcgtacataatactgaaccacttgtagatttgatttttttttttaatctactgcatttagggagtattctaataagctagttgaatacttgaaccataaaatgtccagtaagatcactgtttagatttgccatagagtacactgcctgccttaagtgaggaaatcaaagtgctattacgaagttcaagatcaaaaaggcttataaaacagagtaatcttgttggttcaccattgagaccgtgaagatactttgtattgtcctattagtgttatatgaacatacaaatgcatctttgatgtgttgttcttggcaataaattttgaaaagtaatatttattaaatttttttgtatgaaaacatggaacagtgtggcctcttctgagcttacgtagttctaccggctttgccgtgtgcttctgccaccctgctgagtctgttctggtaatcggggtataataggctctgcctgacagagggatggaggaagaactgaaaggcttttcaaccacaaaactcatctggagttctcaaagacctggggctgctgtgaagctggaactgcgggagccccatctaggggagccttgattcccttgttattcaacagcaagtgtgaatactgcttgaataaacaccactggattaatggccagtagt

SEQ ID NO: 138 - DNA, 1257 bp, Homo sapien
ctattttatttgtatgctatacaatggtgctccactgagactcttgaaattcatcataatgggagtatttcaagctagtgaaatcagcaaatgctataaaccaacccttctttggagagctgaatgttatacatttaccagcacaccactagtgccagcaacaagaaggagctggagctggatatctgccagagattaccagaaattagatggaaacttttcttgcttattttcctaatcagattctacatgcgcacaaatcccttctacccggaagttgagctcaatttcatttctgttttctggccacaactgccaaatgggcttgaagctgcttacgaatttgccgacagagatgaagtccggtttttcaaagggaataagtactgggctgttcagggacagaatgtgctacacggataccccaaggacatctacagctcctttggcttccctagaactgtgaagcatatcgatgctgctctttctgaggaaaacactggaaaaacctacttctttgttgctaacaaatactggaggtatgatgaatataaacgatctatggatccaggttatcccaaaatgatagcacatgactttcctggaattggccacaaagttgatgcagttttcatgaaagatggatttttctatttctttcatggaacaagacaatacaaatttgatcctaaaacgaagagaattttgactctccagaaagctaatagctggttcaactgcaggaaaaattgaacattactaatttgaatggaaaacacatggtgtgagtccaaagaaggtgttttcctgaagaactgtctattttctcagtcatttttaacctctagagtcactgatacacagaatataatcttatttatacctcagtttgcatatttttttactatttagaatgtagccctttttgtactgatataatttagttccacaaatggtgggtacaaaaagtcaagtttgtggcttatggattcatataggccagagttgcaaagatcttttccagagtatgcaactctgacgttgatcccagagagcagcttcagtgacaaacatatcctttcaagacagaaagagacaggagacatgagtctttgccggaggaaaagcagctcaagaacacatgtgcagtcactggtgtcaccctggataggcaagggataactcttctaacacaaaataagtgttttatgtttggaataaagtcaaccttgtttctactgttttataaaaaaaaaa

SEQ ID NO: 139 - DNA, 2110 bp, Homo sapien
caaggaccccctggtgaacctgggcaagctggtccttcaggccctccaggacctcctggtgctataggtccatctggtcctgctggaaaagatggagaatcaggtagacccggacgacctggagagcgaggattgcctggacctccaggtatcaaaggtccagctgggatacctggattccctggtatgaaaggacacagaggcttcgatggacgaaatggagaaaagggtgaaacaggtgctcctggattaaagggtgaaaatggtcttccaggcgaaaatggagctcctggacccatgggtccaagaggggctcctggtgagcgaggacggccaggacttcctggggctgcaggtgctcggggtaatgacggtgctcgaggcagtgatggtcaaccaggccctcctggtcctcctggaactgccggattccctggatcccctggtgctaagggtgaagttggacctgcagggtctcctggttcaaatggtgcccctggacaaagaggagaacctggacctcagggacacgctggtgctcaaggtcctcctggccctcctgggattaatggtagtcctggtggtaaaggcgaaatgggtcccgctggcattcctggagctcctggactgatgggagcccggggtcctccaggaccagccggtgctaatggtgctcctggactgcgaggtggtgcaggtgagcctggtaagaatggtgccaaaggagagcccggaccacgtggtgaacgcggtgaggctggtattccaggtgttccaggagctaaaggcgaagatggcaaggatggatcacctggagaacctggtgcaaatgggcttccaggagctgcaggagaaaggggtgcccctgggttccgaggacctgctggaccaaatggcatcccaggagaaaagggtcctgctggagagcgtggtgctccaggccctgcagggcccagaggagctgctggagaacctggcagagatggcgtccctggaggtccaggaatgaggggcatgcccggaagtccaggaggaccaggaagtgatgggaaaccagggcctcccggaagtcaaggagaaagtggtcgaccaggtcctcctgggccatctggtccccgaggtcagcctggtgtcatgggcttccccggtcctaaaggaaatgatggtgctcctggtaagaatggagaacgaggtggccctggaggacctggccctcagggtcctcctggaaagaatggtgaaactggacctcagggacccccagggcctactgggcctggtggtgacaaaggagacacaggaccccctggtccacaaggattacaaggcttgcctggtacaggtggtcctccaggagaaaatggaaaacctggggaaccaggtccaaagggtgatgccggtgcacctggagctccaggaggcaagggtgatgctggtgcccctggtgaacgtggacctcctggattggcaggggccccaggacttagaggtggagctggtccccctggtcccgaaggaggaaagggtgctgctggtcctcctgggccacctggtgctgctggtactcctggtctgcaaggaatgcctggagaaagaggaggtcttggaagtccctggtcctcccagcgctggtttcgacttcagcttcctgccccagccacctcaagagaaggctcacgatggtggccgctactaccgggctgatgatgccaatgtggttcgtgaccgtgacctcgaggtggacaccaccctcaagagcctgagccagcagatcgagaacatccggagcccagagggcagccgcaagaaccccgcccgcacctgccgtgacctcaagatgtgccactctgactggaagagtggagagtactggattgaccccaaccaaggctgcaacctggatgccatcaaagtcttctgcaacatggagactggtgagacctgcgtgtaccccactcagcccagtgtggcccagaagaactggtacatcaacaagaaccccaaggacaagaggcatgtctggttcggcgagagcatgaccgatggaattccatttccagtttggcgggcagggcttcgacccttccgatgtggccatccagctgacctt

SEQ ID NO: 140 - DNA, 829 bp, Homo sapien
aaactacggtaggtagcgaggctgggtggtgtggtgtctatcgaagatccctttgaccaggatgactggggagcttggcagaagttcacagccagtgcaggaatccaggtagtgggggatgatctcacagtgaccaacccaaagaggatcgccaaggccgtgaacgagaagtcctgcaactgcctcctgctcaaagtcaaccagattggctccgtgaccgagtctcttcaggcgtgcaagctggcccaggccaatggttggggcgtcatggtgtctcatcgttcgggggagactgaagataccttcatcgctgacctggttgtggggctgtgcactgggcagatcaagactggtgccccttgccgatctgagcgcttggccaagtacaaccagctcctcagaattgaagaggagctgggcagcaaggctaagtttgccggcaggaacttcagaaaccccttggccaagtaagctgtgggcaggcaagcccttcggtcacctgttggctacacagacccctcccctcgtgtcagctcaggcagctcgaggcccccgaccaacacttgcaggggtccctgctagttagcgccccaccgccgtggagttcgtaccgcttccttagaacttctacagaagccaagctccctggagccctgttggcagctctagctttgcagtcgtgtaattggcccaagtcattgtttttctcgcctcactttccaccaagtgtctagagtcatgtgagcctcgtgtcatctccggggtggccacaggctagatccccggtggttttgtgctcaaaataaaaagcctcagtgacccatgagaa

SEQ ID NO: 141 - DNA, 1313 bp, Homo sapien
gggaatgagtgacggctctcccgacgaatggcgaggcggactgacgggggcgtgccccggaggcgggaagtgggtggggctcgccttagctaggcaggaagtcggcgcgggcggcgcggacagtatctgtgggtacccggagcacggagatctcgccggctttacgttcacctcggtgtctgcagcaccctccgcttcctctcctaggcgacgagacccagtggctagaagttcaccatgtctattctcaagatccatgccagggagatctttgactctcgcgggaatcccactgttgaggttgatctcttcacctcaaaaggtctcttcagagctgctgtgcccagtggtgcttcaactggtatctatgaggccctagagctccgggacaatgataagactcgctatatggggaagggtaagccttagaacccacagcccatggcctccctgcttccagccccattcctggccttgcccagtcctgtcctctctgggtggcacttgcacttgcaggtttatggcaggtaaacctgctgtgacccatgatgttgatggaagcagtgcaccaccttgtggacaggaaagttggtgtgtggattccggggttcccgagcctgcatgctctgggtcgagagttccaatgcttgcttctattgcagtttgttcccaatctgcgaaatactccttcacggttaggacaggaacccaagcatgagaacagggcctgttaactaaagaaaagtttccccatctcccaggagggttctgtgggccctccagagatcatcagcctcttcacgggctagaaaggatccagggaaggtctaaccaatgacctgccctgaatggtgagctgcaggtgtgtcatttagtgtgattttcctgttgactgactcataggggccctgctctgtggcagagctagcctctggctgtattcaaattgacttagtgtgtgtgcaacattgacctttctagagatagaacatgtggccaaattacagaaaagcacatagggctagatcacgcattctcagtggggcacccggaaaactccaaaaaggctgcagggaggggacaatgatgaaatcaggttgtgaaacactgggctggtgtcgcagtggtggtgctgggtgttcagtcccgctttaatgctgtaagaagcactctacacacacgaacatgttaccatttgaccgttgtttaatggcgtacatggggacttagccggagcaggatgatgctgtgccttgatggtaatgagtgctcagtaagtaagcatttgtggaagattgaacgcatggcccctg

SEQ ID NO: 142 - protein, 331 aa, Homo sapien
MENPSPAAALGKALCALLLATLGAAGQPLGGESICSARAPAKYSITFTGKWSQTAFPKQYPLFRPPAQWSSLLGAAHSSDYSMWRKNQYVSNGLRDFAERGEAWALMKEIEAAGEALQSVHAVFSAPAVPSGTGQTSAELEVQRRHSLVSFVVRIVPSPDWFVGVDSLDLCDGDRWREQAALDLYPYDAGTDSGFTFSSPNFATIPQDTVTEITSSSPSHPANSFYYPRLKALPPIARVTLVRLRQSPRAFIPPAPVLPSRDNEIVDSASVPETPLDCEVSLWSSWGLCGGHCGRLGTKSRTRYVRVQPANNGSPCPELEEEAECVPDNCV

SEQ ID NO: 143 - protein, 518 aa, Homo sapien
RCDSCTLFAVESILQGHSPEERMKGGSRQYLRDSVLSDTHPQVTCVSQLTRKLARMALCGHRVTAMLQGTCGGLGTQPPHSSGLCSQAPWPGAGQVLMSILLALPGTCWTGQAGNAGAEWQFPPYSAGWQPLASRSACGLERIAGSWVRACWLWVSGSHLIWVWDSQCRPQTTADFRLSRGGTGAHQPGHGPRRPPPSMLLAGVEAGTGPPHTCPPSHVVGTDVVLRSSSNYKLTVSRPWKQGPGQVRQEAAWLAGTTPQTETVPSPGSLLIWDELGLPVPASVLPLPSAGLGSSLICPRGCPIPSRCPRATYPTGRRASTVRGVQLVWREEPLVGRGSREVRFAPHLGALGHSGQGSTWPVPWVCHDVGVPPPQGLERQLRLLRRNAQLQSLGCVRGCYGAIPSCRSLCDCAEKRKCPRRVGVASDECTRWWEVASVCTKRLFTRAFTSVSPLLGPVPETPLDCEVSLWSSWGLCGGHCGRLGTKSRTRYVRVQPANNGSPCPELEEEAECVPDNCV

SEQ ID NO: 144 - protein, 298 aa, Homo sapien
MENPSPAAALGKALCALLLATLGAAGQPLGGESICSARAPAKYSITFTGKWSQTAFPKQYPLFRPPAQWSSLLGAAHSSDYSMWRKNQYVSNGLRDFAERGEAWALMKEIEAAGEALQSVHEVFSAPAVPSGTGQTSAELEVQRRHSLVSFVVRIVPSPDWFVGVDSLDLCDGDRWREQAALDLYPYDAGTDSGFTFSSPNFATIPQDTVTEITSSSPSHPANSFYYPRLKALPPIARVTLLRLRQSPRAFIPPAPVLPSRDNEIVDSASGNGHTGHMGHTAAPNPATGRPPNPNLRL

SEQ ID NO: 145 - protein, 504 aa, Homo sapien
RCDSCTLFAVESILQGHSPEERMKGGSRQYLRDSVLSDTHPQVTCVSQLTRKLARMALCGHRVTAMLQGTCGGLGTQPPHSSGLCSQAPWPGAGQVLMSILLALPGTCWTGQAGNAGAEWQFPPYSAGWQPLASRSACGLERIAGSWVRACWLWVSGSHLIWVWDSQCRPQTTADFRLSRGGTGAHQPGHGPRRPPPSMLLAGVEAGTGPPHTCPPSHVVGTDVVLRSSSNYKLTVSRPWKQGPGQVRQEAAWLAGTTPQTETVPSPGSLLIWDELGLPVPASVLPLPSAGLGSSLICPRGCPIPSRCPRATYPTGRRASTVRGVQLVWREEPLVGRGSREVRFAPHLGALGHSGQGSTWPVPWARRGIKSAVAKQKQYCRGRVGRDCAMSSEQEAGHGEKGGRRTEPAVPAEGPEWAVGTEHRPPPTRVSPVTSGFPRAEAGMGMWRLAPRRLRQVHAKPAWLSSGFLLTRWMPVPRPPDRALQHWRGLWWGPRCRTGTASAH

SEQ ID NO: 146 - protein, 829 aa, Homo sapien
MENPSPAAALGKALCALLLATLGAAGQPLGGESICSARAPAKYSITFTGKWSQTAFPKQYPLFRPPAQWSSLLGAAHSSDYSMWRKNQYVSNGLRDFAERGEAWALMKEIEAAGEALQSVHEVFSAPAVPSGTGQTSAELEVQRRHSLVSFVVRIVPSPDWFVGVDSLDLCDGDRWREQAALDLYPYDAGTDSGFTFSSPNFATIPQDTVTEITSSSPSHPANSFYYPRLKALPPIARVTLLRLRQSPRAFIPPAPVLPSRDNEIVDSASGNGHTGHMGHTAAPNPATGRPPNPNQGSEKFQVGIRSAYCKMVPRRFRILLIHTLKMDSCTLFAVESILQGHSPEERMKGGSRQYLRDSVLSDTHPQVTCVSQLTRKLARMALCGHRVTAMLQGTCGGLGTQPPHSSGLCSQAPWPGAGQVLMSILLALPGTCWTGQAGNAGAEWQFPPYSAGWQPLASRSACGLERIAGSWVRACWLWVSGSHLIWVWDSQCRPQTTADFRLSRGGTGAHQPGHGPRRPPPSMLLAGVEAGTGPPHTCPPSHVVGTDVVLRSSSNYKLTVSRPWKQGPGQVRQEAAWLAGTTPQTETVPSPGSLLIWDELGLPVPASVLPLPSAGLGSSLICPRGCPIPSRCPRATYPTGRRASTVRGVQLVWREEPLVGRGSREVRFAPHLGALGHSGQGSTWPVPWARRGIKSAVAKQKQYCRGRVGRDCAMSSEQEAGHGEKGGRRTEPAVPAEGPEWAVGTEHRPPPTRVSPVTSGFPRAEAGMGMWRLAPRRLRQVHAKPAWLSSGFLLTRWMPVPRPPDRALQHWRGLWWGPRCRTGTASAH

SEQ ID NO: 147 - protein, 504 aa, Homo sapien; identical to SEQ ID NO: 145

SEQ ID NO: 148 - protein, 935 aa, Homo sapien
GGIGRGDKERGAAALPGEEGDPTRGRSLGRASWESGSPRRPRSPFSSFLPRPICLSLEARPCSIEDRRNWSLIGRPGAPASGLNRSSGLWLGPDRCRPRSRCSCRVMENPSPAAALGKALCALLLATLGAAGQPLGGESICSARAPAKYSITFTGKWSQTAFPKQYPLFRPPAQWSSLLGAAHSSDYSMWRKNQYVSNGLRDFAERGEAWALMKEIEAAGEALQSVHEVFSAPAVPSGTGQTSAELEVQRRHSLVSFVVRIVPSPDWFVGVDSLDLCDGDRWREQAALDLYPYDAGTDSGFTFSSPNFATIPQDTVTEITSSSPSHPANSFYYPRLKALPPIARVTLLRLRQSPRAFIPPAPVLPSRDNEIVDSASGNGHTGHMGHTAAPNPATGRPPNPNQGSEKFQVGIRSAYCKMVPRRFRILLIHTLKMDSCTLFAVESILQGHSPEERMKGGSRQYLRDSVLSDTHPQVTCVSQLTRKLARMALCGHRVTAMLQGTCGGLGTQPPHSSGLCSQAPWPGAGQVLMSILLALPGTCWTGQAGNAGAEWQFPPYSAGWQPLASRSACGLERIAGSWVRACWLWVSGSHLIWVWDSQCRPQTTADFRLSRGGTGAHQPGHGPRRPPPSMLLAGVEAGTGPPHTCPPSHVVGTDVVLRSSSNYKLTVSRPWKQGPGQVRQEAAWLAGTTPQTETVPSPGSLLIWDELGLPVPASVLPLPSAGLGSSLICPRGCPIPSRCPRATYPTGRRASTVRGVQLVWREEPLVGRGSREVRFAPHLGALGHSGQGSTWPVPWARRGIKSAVAKQKQYCRGRVGRDCAMSSEQEAGHGEKGGRRTEPAVPAEGPEWAVGTEHRPPPTRVSPVTSGFPRAEAGMGMWRLAPRRLRQVHAKPAWLSSGFLLTRWMPVPRPPDRALQHWRGLWWGPRCRTGTASAH

SEQ ID NO: 149 - protein, 504 aa, Homo sapien; identical to SEQ ID NO: 145

SEQ ID NO: 150 - protein, 504 aa, Homo sapien; identical to SEQ ID NO: 145

SEQ ID NO: 151 - protein, 290 aa, Homo sapien
GGIGRGDKERGAAALPGEEGDPTRGRSLGRASWESGSPRRPRSPFSSFLPRPICLSLEARPCSIEDRRNWSLIGRPGAPASGLNRSSGLWLGPDRCRPRSRCSCRVMENPSPAAALGKALCALLLATLGAAGQPLGGESICSARAPAKYSITFTGKWSQTAFPKQYPLFRPPAQWSSLLGAAHSSDYSMWRKNQYVSNGLRDFAERGEAWALMKEIEAAGEALQSVHEVFSAPAVPSGTGSFLQQGCPPSPGVPTGFPGASYSATMWEFHHHRDLSGSSGSYVETRNSSP

SEQ ID NO: 152 - protein, 504 aa, Homo sapien; identical to SEQ ID NO: 145

SEQ ID NO: 153 - protein, 292 aa, Homo sapien
MNPIVVVHGGGAGPISKDRKERVHQGMVRAATVGYGILREGGSAVDAVEGAVVALEDDPEFNAGCGSVLNTNGEVEMDASIMDGKDLSAGAVSAVQCIANPIKLARLVMEKTPHCFLTDQGAAQFAAAMGVPEIPGEKLVTERNKKRLEKEKHEKGAQKTDCQKNLGTVGAVALDCKGNVAYATSTGGIVNKMVGRVGDSPCLGAGGYADNDIGAVSTTGHGESILKVNLARLTPVQCFEILPTSPSSPAGSGAVQCGQHGEESHFLGGQYSSLSLITLEMLFLLYHPCSTF

SEQ ID NO: 154 - protein, 106 aa, Homo sapien [sequence omitted]

SEQ ID NO: 155 - protein, 186 aa, Homo sapien
VQHGRRGLVVVLRLPIALPLHGDVAGIEAFDQAGQADLVLGQLIPGWGQGVHLWFSGLPFGFGDGFLDGGWEGFVGDLALVLLAIQPVLVQDGEDADHTVRAVVLLLPRLCLGIMHLHAVHVPVELDLRVFVAHVHHHAHVHCTLYDDAPRPYLAFLRYDYRDLLPSLRSWPRRYLCTEVSHHPCR

SEQ ID NO: 156 - protein, 119 aa, Homo sapien
MAFEVLNLRSRNHAFLLICRASLELPPPAVKGACRPGRLSPGAWLEVAGAGTGRALAGVVVGSSALLPWLPLLNPPLTFVGSCSVRRELGALAPRLLSSQEDLPHRHQWLLLWPREVGL

SEQ ID NO: 157 - protein, 199 aa, Homo sapien
QTSCVALKKGSSTFPDHKVKVTPLGNPDRPAAGQTDRERESEGEGEVSNAPGTPGSLAHISSPAQAPSGKMNPCIFLFSNMAFEVLNLRSRNHAFLLICRASLELPPPAVKGACRPGRLSPGAWLEVAGAGTGRALAGVVVGSSALLPWLPLLNPPLTFVGSCSVRRELGALAPRLLSSQEDLPHRHQWLLLWPREVGL

SEQ ID NO: 158 - protein, 234 aa, Homo sapien
MGWYWWLVTDVEGGHLLLPQSTVVDVGEAFFELTQSDKIEKRILKNEQILLKKSCEFFLKHNSKVKHKKKHYKPSSHKLKVISKSMGTSTGATANHGTSAVAITSHDYLGQETLTEIQTSPETSMREVKADGASTPRLREQDCGEPASPAASISRLSGEQVDGKGQAGSVSESARSEGRISPKSDITDTGLAQSNNLQVPSSSEPSSLKGSTSLLVHPVSGVRKEQGGGCHSDT

SEQ ID NO: 159 - protein, 201 aa, Homo sapien
PSQTKIEKRILKNEQILLKKSCEFFLKHNSKVKHKKKHYKPSSHKLKVISKSMGTSTGATANHGTSAVAITSHDYLGQETLTEIQTSPETSMREVKADGASTPRLREQDCGEPASPAASISRLSGEQVDGKGQAGSVSESARSEGRISPKSDITDTGLAQSNNLQVPSSSEPSSLKGSTSLLVHPVSGVRKEQGGGCHSDT

SEQ ID NO: 160 - protein, 159 aa, Homo sapien
MDPDALLWGMSCHGLGRTESNRTLLLPWPHLVQHRRPKPGLSPLSPTHLSLPRKKKCDYWIRTFVPGCQPGEFTLGNIKSYPGLTSYLVRVVSTNYNQHAMVFFKKVSQNREYFKITLYGRTKELTSELKENFIRFSKSLGLPENHIVFPVPIDQCIDG

SEQ ID NO: 161 - protein, 158 aa, Homo sapien
GSRRSLWGMSCHGLGRTESNRTLLLPWPHLVQHRRPKPGLSPLSPTHLSLPRKKKCDYWIRTFVPGCQPGEFTLGNIKSYPGLTSYLVRVVSTNYNQHAMVFFKKVSQNREYFKITLYGRTKELTSELKENFIRFSKSLGLPENHIVFPVPIDQCIDG

SEQ ID NO: 162 - protein, 229 aa, Homo sapien
MWPPGRSITVKLREKTVSRKLEMNGPSAFQGLICGKYNGMCLQGPAGVPGRDGSPGANGIPGTPGIPGRDGFKGEKGECLRESFEESWTPNYKQCSWSSLNYGIDLGKIAECTFTKMRSNSALRVLFSGSLRLKCRNACCQRWYFTFNGAECSGPLPIEAIIYLDQGSPEMNSTINIHRTSSVEGLCEGIGAGLVDVAIWVGTCSDYPKGDASTGWNSVSRIIIEELPK

SEQ ID NO: 163 - protein, 214 aa, Homo sapien
MVGRRALIVLAHSERTSFNYAMKEAAAAALKKKGWEVVESDLYAMNFNPIISRKDITGKLKDPANFQYPAESVLAYKEGHLSPDIVAELGVPAILKGWFERVFIGEFAYTYAAMYDKGPFRSKKAVLSITTGGSGSMYSLQGIHRDMNVILWPIQSGILHFWGFQVLEPSLTYSIGTLQQTPELNPVRMGETPDDICMRHHDFAPRALCLNFSK

SEQ ID NO: 164 - protein, 172 aa, Homo sapien
  MISC_FEATURE (112)..(112): x=any amino acid
  MISC_FEATURE (144)..(144): x=any amino acid
LPPVAPAGESGEAPPSSPRLPPFLELQPQHPPPRHPYAYSGRCGPALVRLSTSYIGAWTGYISRECHPWHYTRDSHKVAAGAAQLTESLVPARDRPGNHEPSQLSAPRLLPXTMVGRRALIVLAHSERTSFNYAMKEAAAAALXKKGWEVVESDLYAMNFNPIISRKDITGN

SEQ ID NO: 165 - protein, 440 aa, Homo sapien
MALLVLGLVSCTFFLAVNGLYSSSDDVIELTPSNFNREVIQSDSLWLVEFYAPWCGHCQRLTPEWKKAATALKDVVKVGAVDADKHHSLGGQYGVQGFPTIKIFGSNKNRPEDYQGGRTGEAIVDAALSALRQLVKDRLGGRSGGYSSGKQGRSDSSSKKDVIELTDDSFDKNVLDSEDVWMVEFYAPWCGHCKNLEPEWAAAASEVKEQTKGKVKLAAVDATVNQVLASRYGIRGFPTIKIFQKGESPVDYDGGRTRSDIVSRALDLFSDNAPPPELLEIINEDIAKRTCEEHQLCVVAVLPHILDTGAAGRNSYLEVLLKLADKYKKKMWGWLWTEAGAQSELETALGIGGFGYPAMAAINARKMKFALLKGSFSEQGINEFLRELSFGRGSTAPVGGGAFPTIVEREPWDGRDGELPVEDDIDLSDVELDDLGKDEL

SEQ ID NO: 166 - protein, 461 aa, Homo sapien
LAPGFYCASRFYTGCSTPGSAWLSWVLGLVSCTFFLAVNGLYSSSDDVIELTPSNFNREVIQSDSLWLVEFYAPWCGHCQRLTPEWKKAATALKDVVKVGAVDADKHHSLGGQYGVQGFPTIKIFGSNKNRPEDYQGGRTGEAIVDAALSALRQLVKDRLGGRSGGYSSGKQGRSDSSSKKDVIELTDDSFDKNVLDSEDVWMVEFYAPWCGHCKNLEPEWAAAASEVKEQTKGKVKLAAVDATVNQVLASRYGIRGFPTIKIFQKGESPVDYDGGRTRSDIVSRALDLFSDNAPPPELLEIINEDIAKRTCEEHQLCVVAVLPHILDTGAAGRNSYLEVLLKLADKYKKKMWGWLWTEAGAQSELETALGIGGFGYPAMAAINARKMKFALLKGSFSEQGINEFLRELSFGRGSTAPVGGGAFPTIVEREPWDGRDGELPVEDDIDLSDVELDDLGKDEL

SEQ ID NO: 167 - protein, 97 aa, Homo sapien
EGCIKILSFHIGVSFEDVAVPLSQEEWDCLIPAQRGLYKDVMMGTYGNLLSLVGEWLSKLWYIHTMGYDSTIKRNCPDFTTMQYMHVRNLHLYPLNI

SEQ ID NO: 168 - protein, 81 aa, Homo sapien
AAAPTSEWCSTYEVRLTQTVAHLKQQVSGLEGVQDDLFWLTFEGKPLEDQLPLGEYGLKPLSTVFMNLRLRGGGTEPGGRS

SEQ ID NO: 169 - protein, 102 aa, Homo sapien
GRSNIRMVQHLRGAADADRGPPEAASERAGGCAGRPVLADLRGEAPGGPAPAGGVRPQAPEHRVHESAPAGRRHRAWRAELRASTSIRAGSRAGNKGCCKEK

SEQ ID NO: 170 - protein, 709 aa, Homo sapien
MEKKKIVLEQEVKTLNDSLKKVENKVSAIVDEKENVIKEVEGKRALLEIKEREHNQLVKLLELARENEATSLTERGILDLNLRNSLIDKQNYHDELSRKQREKERDFRNLRKMELLLKVSWDALRQTQALHQRLLLEMEAIPKDDSTLSERRRELHKEVEVAKRNLAQQKIISEMESKLVEQQLAEENKLLKEQENMKELVVNLLRMTQIKIDEKEQKSKDFLKAQQKYTNIVKEMKAKDLEIRIHKKKKCEIYRRLREFAKLYDTIRNERNKFVNLLHKAHQKVNEIKERHKMSLNELEILRNSAVSQERKLQNSMLKHANNVTIRESMQNDVRKIVSKLQEMKEKKEAQLNNIDRLANTITMIEEEMVQLRKRYEKAVQHEMKASASEFDHSGVQLIEREEEICIFYEKINIQEKMKLNGEIEIHLLEEKIQFLKMKIAEKQRQICVTQKLLPAKRSLDADLAVLQIQFSQCTDRIKDLEKQFVKPDGENRARFLPGKDLTEKEMIQKLDKLELQLAKKEEKLLEKDFIYEQVSRLTDRLCSKTQGCKQDTLLLAKKMNGYQRRIKNATEKMMALVAELSMKQALTIELQKEVREKEDFIFTCNSRIEKGLPLNKEIEKEWLKVLRDEEMHALAIAEKSQEFLEADNRQLPNGVYTTAEQRPNAYIPEADATLPLPKPYGALAPFKPSEPGANMRHIRKPVIKPVEI

SEQ ID NO: 171 - protein, 413 aa, Homo sapien
SQHGLKIRQVCVCVCVCVCIPYREMEKKKIVLEQEVKTLNDSLKKVENKVSAIVDEKENVIKEVEGKRALLEIKEREHNQLVKLLELARENEATSLTERGILDLNLRNSLIDKQNYHDELSRKQREKERDFRNLRKMELLLKVSWDALRQTQALHQRLLLEMEAIPKDDSTLSERRRELHKEVEVAKRNLAQQKIISEMESKLVEQQLAEENKLLKEQENMKELVVNLLRMTQIKIDEKEQKSKDFLKAQQKYTNIVKEMKAKDLEIRIHKKKKCEIYRRLREFAKLYDTIRNERNKFVNLLHKAHQKVNEIKERHKMSLNELEILRNSAVSQERKLQNSMLKHANNVTIRESMQNDVRKIVSKLQEMKEKKEAQLNNIDRLANTITMIEEEMVQLRKRYEKAVQHRNESLCL

SEQ ID NO: 172 - protein, 128 aa, Homo sapien
MAMGLMHARAAQCDGCRGEAAPGRSDVMVSSSLNPGVARGHRDRGQASRRWLQEGGQECECKDWFLRAPRRKFMTVSGLPKKQCPCDHFKGNVKKTRHQRHHRKPNKHSRACQQFLKQCQLRSFALPL

SEQ ID NO: 173 - protein, 94 aa, Homo sapien
IRVARGHRDRGQASRRWLQEGGQECECKDWFLRAPRRKFMTVSGLPKKQCPCDHFKGNVKKTRHQRHHRKPNKHSRACQQFLKQCQLRSFALPL

SEQ ID NO: 174 - protein, 118 aa, Homo sapien
MAMGLMHARAAQCDGCRGEAAPGRSGVARGHRDRGQASRRWLQEGGQECECKDWFLRAPRRKFMTVSGLPKKQCPCDHFKGNVKKTRHQRHHRKPNKHSRACQQFLKQCQLRSFALPL

SEQ ID NO: 175 - protein, 100 aa, Homo sapien
WMRRRAGRVARGHRDRGQASRRWLQEGGQECECKDWFLRAPRRKFMTVSGLPKKQCPCDHFKGNVKKTRHQRHHRKPNKHSRACQQFLKQCQLRSFALPL

SEQ ID NO: 176 - protein, 30 aa, Homo sapien
NACRAAQCDGSAARAGLQEGGKNVSAKIGS

SEQ ID NO: 177 - protein, 84 aa, Homo sapien
WIGRPGRSPGRRQECECKDWFLRAPRRKFMTVSGLPKKQCPCDHFKGNVKKTRHQRHHRKPNKHSRACQQFLKQCQLRSFALPL

SEQ ID NO: 178 - protein, 145 aa, Homo sapien
MQERTGAATARRESLPQANNPEQLCKQRCINEASWTMKRVLSCVPEPTVVMAARALCMLGLVLALLSSSSAEEYVGLSQQGLWQLTGLCLGQPANQCAVPAKDRVDCGYPHVTPKECNNRGCCFDSRIPGVPWCFKPLQEAECTF

SEQ ID NO: 179 - protein, 91 aa, Homo sapien
MQERTGAATARRESLPQANNPEQLCKQRCINEASWTMKRVLSCVPEPTVVMAARALCMLGLVLALLSSSSAEEYVGLWKVHLPKGEGFSSG

SEQ ID NO: 180 - protein, 1217 aa, Homo sapien [sequence omitted]

SEQ ID NO: 181 - protein, 1375 aa, Homo sapien
MELAALCRWGLLLALLPPGAASTQVCTGTDMKLRLPASPETHLDMLRHLYQGCQVVQGNLELTYLPTNASLSFLQDIQEVQGYVLIAHNQVRQVPLQRLRIVRGTQLFEDNYALAVLDNGDPLNNTTPVTGASPGGLRELQLRSLTEILKGGVLIQRNPQLCYQDTILWKDIFHKNNQLALTLIDTNRSRACHPCSPMCKGSRCWGESSEDCQSLTRTVCAGGCARCKGPLPTDCCHEQCAAGCTGPKHSDCLACLHFNHSGICELHCPALVTYNTDTFESMPNPEGRYTFGASCVTACPYNYLSTDVGSCTLVCPLHNQEVTAEDGTQRCEKCSKPCARVCYGLGMEHLREVRAVTSANIQEFAGCKKIFGSLAFLPESFDGDPASNTAPLQPEQLQVFETLEEITGYLYISAWPDSLPDLSVFQNLQVIRGRILHNGAYSLTLQGLGISWLGLRSLRELGSGLALIHHNTHLCFVHTVPWDQLFRNPHQALLHTANRPEDECGKTGSPVCALPICQHTAVPRGPWQQRSWTCADCPSLCTLLDSAQLWLAWPLGMASLAGSYLPWHPSLPLFSEISELFLSLHRPHLSPPLQPTAMPTASSLVHLDLGPPLKVPCGPFLLTAVGEGLACHQLCARGHCWGPGPTQCVNCSQFLRGQECVEECRVLQGLPREYVNARHCLPCHPECQPQNGSVTCFGPEADQCVACAHYKDPPFCVARCPSGVKPDLSYMPIWKFPDEEGACQPCPINCTHSCVDLDDKGCPAEQRASPLTSIISAVVGILLVVVLGVVFGILIKRRQQKIRKYTMRRLLQETELVEPLTPSGAMPNQAQMRILKETELRKVKVLGSGAFGTVYKGIWIPDGENVKIPVAIKVLRENTSPKANKEILDEAYVMAGVGSPYVSRLLGICLTSTVQLVTQLMPYGCLLDHVRENRGRLGSQDLLNWCMQIAKGMSYLEDVRLVHRDLAARNVLVKSPNHVKITDFGLARLLDIDETEYHADGGKVPIKWMALESILRRRFTHQSDVWSYGVTVWELMTFGAKPYDGIPAREIPDLLEKGERLPQPPICTIDVYMIMVKCWMIDSECRPRFRELVSEFSRMARDPQRFVVIQNEDLGPASPLDSTFYRSLLEDDDMGDLVDAEEYLVPQQGFFCPDPAPGAGGMVHHRHRSSSTRSGGGDLTLGLEPSEEEAPRSPLAPSEGAGSDVFDGDLGMGAAKGLQSLPTHDPSPLQRYSEDPTVPLPSETDGYVAPLTCSPQPEYVNQPDVRPQPPSPREGPLPAARPAGATLERAKTLSPGKNGVVKDVFAFGGAVENPEYLTPQGGAAPQPHPPPAFSPAFDNLYYWDQDPPERGAPPSTFKGTPTAENPEYLGLDVPV

SEQ ID NO: 182 - protein, 575 aa, Homo sapien
MELAALCRWGLLLALLPPGAASTQVCTGTDMKLRLPASPETHLDMLRHLYQGCQVVQGNLELTYLPTNASLSFLQDIQEVQGYVLIAHNQVRQVPLQRLRIVRGTQLFEDNYALAVLDNGDPLNNTTPVTGASPGGLRELQLRSLTEILKGGVLIQRNPQLCYQDTILWKDIFHKNNQLALTLIDTNRSRACHPCSPMCKGSRCWGESSEDCQSLTRTVCAGGCARCKGPLPTDCCHEQCAAGCTGPKHSDCLACLHFNHSGICELHCPALVTYNTDTFESMPNPEGRYTFGASCVTACPYNYLSTDVGSCTLVCPLHNQEVTAEDGTQRCEKCSKPCARVCYGLGMEHLREVRAVTSANIQEFAGCKKIFGSLAFLPESFDGDPASNTAPLQPEQLQVFETLEEITGYLYISAWPDSLPDLSVFQNLQVIRGRILHNGAYSLTLQGLGISWLGLRSLRELGSGLALIHHNTHLCFVHTVPWDQLFRNPHQALLHTANRPEDECGKTGSPVCALPICQHTAVPRGPWQQRSWTCADCPSLCTLLDSAQLWLAWPLGMASLAGSYLPWHPSLPLCF

SEQ ID NO: 183 - protein, 815 aa, Homo sapien
LGPTCLGILPSPSVSEISELFLSLHRPHLSPPLQPTAMPTASSLVHLDLGPPLKVPCGPFLLTAVGEGLACHQLCARGHCWGPGPTQCVNCSQFLRGQECVEECRVLQGLPREYVNARHCLPCHPECQPQNGSVTCFGPEADQCVACAHYKDPPFCVARCPSGVKPDLSYMPIWKFPDEEGACQPCPINCTHSCVDLDDKGCPAEQRASPLTSIISAVVGILLVVVLGVVFGILIKRRQQKIRKYTMRRLLQETELVEPLTPSGAMPNQAQMRILKETELRKVKVLGSGAFGTVYKGIWIPDGENVKIPVAIKVLRENTSPKANKEILDEAYVMAGVGSPYVSRLLGICLTSTVQLVTQLMPYGCLLDHVRENRGRLGSQDLLNWCMQIAKGMSYLEDVRLVHRDLAARNVLVKSPNHVKITDFGLARLLDIDETEYHADGGKVPIKWMALESILRRRFTHQSDVWSYGVTVWELMTFGAKPYDGIPAREIPDLLEKGERLPQPPICTIDVYMIMVKCWMIDSECRPRFRELVSEFSRMARDPQRFVVIQNEDLGPASPLDSTFYRSLLEDDDMGDLVDAEEYLVPQQGFFCPDPAPGAGGMVHHRHRSSSTRSGGGDLTLGLEPSEEEAPRSPLAPSEGAGSDVFDGDLGMGAAKGLQSLPTHDPSPLQRYSEDPTVPLPSETDGYVAPLTCSPQPEYVNQPDVRPQPPSPREGPLPAARPAGATLERAKTLSPGKNGVVKDVFAFGGAVENPEYLTPQGGAAPQPHPPPAFSPAFDNLYYWDQDPPERGAPPSTFKGTPTAENPEYLGLDVPV

SEQ ID NO: 184 - protein, 164 aa, Homo sapien
SRGSLSTFCSALTDPSPLQRYSEDPTVPLPSETDGYVAPLTCSPQPEYVNQPDVRPQPPSPREGPLPAARPAGATLERAKTLSPGKNGVVKDVFAFGGAVENPEYLTPQGGAAPQPHPPPAFSPAFDNLYYWDQDPPERGAPPSTFKGTPTAENPEYLGLDVPV

SEQ ID NO: 185 - protein, 162 aa, Homo sapien
RILVDFCSALTDPSPLQRYSEDPTVPLPSETDGYVAPLTCSPQPEYVNQPDVRPQPPSPREGPLPAARPAGATLERAKTLSPGKNGVVKDVFAFGGAVENPEYLTPQGGAAPQPHPPPAFSPAFDNLYYWDQDPPERGAPPSTFKGTPTAENPEYLGLDVPV

SEQ ID NO: 186 - protein, 75 aa, Homo sapien
LYGPKVATPSSCLQPSLRQPLLLGPGPTRAGGSTQHLQRDTYGREPRVPGSGRASVNQKAKSAEALMCPQGAGKA

SEQ ID NO: 187 - protein, 100 aa, Homo sapien
CVLREQGRPDFCWHQEVGGPSDHFQGNLPCQEPVLRNLPSCLSSQMAGRGPASLEEEQHWGVFVDSEALPNETLGSSGCHSPAWPFPSRSWVLKALGKLA

SEQ ID NO: 188 - protein, 678 aa, Homo sapien
MELAALCRWGLLLALLPPGAASTQVCTGTDMKLRLPASPETHLDMLRHLYQGCQVVQGNLELTYLPTNASLSFLQDIQEVQGYVLIAHNQVRQVPLQRLRIVRGTQLFEDNYALAVLDNGDPLNNTTPVTGASPGGLRELQLRSLTEILKGGVLIQRNPQLCYQDTILWKDIFHKNNQLALTLIDTNRSRACHPCSPMCKGSRCWGESSEDCQSLTRTVCAGGCARCKGPLPTDCCHEQCAAGCTGPKHSDCLACLHFNHSGICELHCPALVTYNTDTFESMPNPEGRYTFGASCVTACPYNYLSTDVGSCTLVCPLHNQEVTAEDGTQRCEKCSKPCARVCYGLGMEHLREVRAVTSANIQEFAGCKKIFGSLAFLPESFDGDPASNTAPLQPEQLQVFETLEEITGYLYISAWPDSLPDLSVFQNLQVIRGRILHNGAYSLTLQGLGISWLGLRSLRELGSGLALIHHNTHLCFVHTVPWDQLFRNPHQALLHTANRPEDECVGEGLACHQLCARGHCWGPGPTQCVNCSQFLRGQECVEECRVLQGLPREYVNARHCLPCHPECQPQNGSVTCFGPEADQCVACAHYKDPPFCVARCPSGVKPDLSYMPIWKFPDEEGACQPCPINCTHSCVDLDDKGCPAEQRARLAWTPGCTLHCPSLPHWMLGGHCCREGTP

SEQ ID NO: 189 - protein, 195 aa, Homo sapien
MAAGQRRSSLSRLGSQAEGLLISQTMGGQAETLLTSQTGWRPGRGCNLGSLGGQGRRLGGGCSEPRSRHCTPALAPIEHWVNETPSAIPAPREAEVVDHSRLGAGVEAKNYEEIAKVEKLKPLEVELRRLEDLSESIVNDFAYMKKREEEMRDTNESTNTRVLYFSIFSMFCLIGLATWQVFYLRRFFKAKKLIE

SEQ ID NO: 190 - protein, 114 aa, Homo sapien
  MISC_FEATURE (15)..(16): x=any amino acid
TRLRLQSRHLGRPRXXDHSRLGAGVEAKNYEEIAKVEKLKPLEVELRRLEDLSESIVNDFAYMKKREEEMRDTNESTNTRVLYFSIFSMFCLIGLATWQVFYLRRFFKAKKLIE

SEQ ID NO: 191 - protein, 64 aa, Homo sapien
MSALWRFGLFNTGLGQDSEGHCGPSTIRSFPFPLMTSPVALFSLFQMAQTTPPFPPHTPITVQG

SEQ ID NO: 192 - protein, 325 aa, Homo sapien
HRIGTGFRGTLWPFYNQELPLSSDDITCGFVLFVPDGPDDPTISPSYTYYRPGVNLSLSCHAASNPPAQYSWLIDGNIQQHTQELFISNITEKNSGLYTCQANNSASGHSRTTVKTITVSAELPKPSISSNNSKPVEDKDAVAFTCEPEAQNTTYLWWVNGQSLPVSPRLQLSNGNRTLTLFNVTRNDARAYVCGIQNSVSANRSDPVTLDVLYGPDTPIISPPDSSYLSGANLNLSCHSASNPSPQYSWRINGIPQQHTQVLFIAKITPNNNGTYACFVSNLATGRNNSIVKSITVSASGTSPGLSAGATVGIMIGVLVGVALI

SEQ ID NO: 193 - protein, 702 aa, Homo sapien
MESPSAPPHRWCIPWQRLLLTASLLTFWNPPTTAKLTIESTPFNVAEGKEVLLLVHNLPQHLFGYSWYKGERVDGNRQIIGYVIGTQQATPGPAYSGREIIYPNASLLIQNIIQNDTGFYTLHVIKSDLVNEEATGQFRVYPELPKPSISSNNSKPVEDKDAVAFTCEPETQDATYLWWVNNQSLPVSPRLQLSNGNRTLTLFNVTRNDTASYKCETQNPVSARRSDSVILNVLYGPDAPTISPLNTSYRSGENLNLSCHAASNPPAQYSWFVNGTFQQSTQELFIPNITVNNSGSYTCQAHNSDTGLNRTTVTTITVYAEPPKPFITSNNSNPVEDEDAVALTCEPEIQNTTYLWWVNNQSLPVSPRLQLSNDNRTLTLLSVTRNDVGPYECGIQNELSVDHSDPVILNVLYGPDDPTISPSYTYYRPGVNLSLSCHAASNPPAQYSWLIDGNIQQHTQELFISNITEKNSGLYTCQANNSASGHSRTTVKTITVSAELPKPSISSNNSKPVEDKDAVAFTCEPEAQNTTYLWWVNGQSLPVSPRLQLSNGNRTLTLFNVTRNDARAYVCGIQNSVSANRSDPVTLDVLYGPDTPIISPPDSSYLSGANLNLSCHSASNPSPQYSWRINGIPQQHTQVLFIAKITPNNNGTYACFVSNLATGRNNSIVKSITVSASGTSPGLSAGATVGIMIGVLVGVALI

SEQ ID NO: 194 - protein, 726 aa, Homo sapien
MESPSAPPHRWCIPWQRLLLTASLLTFWNPPTTAKLTIESTPFNVAEGKEVLLLVHNLPQHLFGYSWYKGERVDGNRQIIGYVIGTQQATPGPAYSGREIIYPNASLLIQNIIQNDTGFYTLHVIKSDLVNEEATGQFRVYPELPKPSISSNNSKPVEDKDAVAFTCEPETQDATYLWWVNNQSLPVSPRLQLSNGNRTLTLFNVTRNDTASYKCETQNPVSARRSDSVILNVLYGPDAPTISPLNTSYRSGENLNLSCHAASNPPAQYSWFVNGTFQQSTQELFIPNITVNNSGSYTCQAHNSDTGLNRTTVTTITVYAEPPKPFITSNNSNPVEDEDAVALTCEPEIQNTTYLWWVNNQSLPVSPRLQLSNDNRTLTLLSVTRNDVGPYECGIQNELSVDHSDPVILNVLYGPDDPTISPSYTYYRPGVNLSLSCHAASNPPAQYSWLIDGNIQQHTQELFISNITEKNSGLYTCQANNSASGHSRTTVKTITVSAELPKPSISSNNSKPVEDKDAVAFTCEPEAQNTTYLWWVNGQSLPVSPRLQLSNGNRTLTLFNVTRNDARAYVCGIQNSVSANRSDPVTLDVLYGPDTPIISPPDSSYLSGANLNLSCHSASNPSPQYSWRINGIPQQHTQVLFIAKITPNNNGTYACFVSNLATGRNNSIVKSITVSDSCFASSLKHLQQLQSKIASLPRIFTEKTLTRDRDHPSQHRETPSLLKIQK

SEQ ID NO: 195 - protein, 193 aa, Homo sapien
MDAWSRRGPPTHTRQSCHGENSSVSILAPLVALSYTLARDTTVKPGAKKDTKDSRPKLPQTLSRGWGDQLIWTQTYEEALYKSKTSNKPLMIIHHLDECPHSQALKKVFAENKEIQKLAEQFVLLNLVYETTDKHLSPDGQYVPRIMFVDPSLTVRADITGRYSNRLYAYEPADTALLLDNMKKALKLLKTEL

SEQ ID NO: 196 - protein, 199 aa, Homo sapien
CRAAQCDGCVVAARCRRLTQGRVAMEKIPVSAFLLLVALSYTLARDTTVKPGAKKDTKDSRPKLPQTLSRGWGDQLIWTQTYEEALYKSKTSNKPLMIIHHLDECPHSQALKKVFAENKEIQKLAEQFVLLNLVYETTDKHLSPDGQYVPRIMFVDPSLTVRADITGRYSNRLYAYEPADTALLLDNMKKALKLLKTEL

SEQ ID NO: 197 - protein, 187 aa, Homo sapien
MDRGRGRGQSCHGENSSVSILAPLVALSYTLARDTTVKPGAKKDTKDSRPKLPQTLSRGWGDQLIWTQTYEEALYKSKTSNKPLMIIHHLDECPHSQALKKVFAENKEIQKLAEQFVLLNLVYETTDKHLSPDGQYVPRIMFVDPSLTVRADITGRYSNRLYAYEPADTALLLDNMKKALKLLKTEL

SEQ ID NO: 198 - protein, 186 aa, Homo sapien
WIVVAAEVRVAMEKIPVSAFLLLVALSYTLARDTTVKPGAKKDTKDSRPKLPQTLSRGWGDQLIWTQTYEEALYKSKTSNKPLMIIHHLDECPHSQALKKVFAENKEIQKLAEQFVLLNLVYETTDKHLSPDGQYVPRIMFVDPSLTVRADITGRYSNRLYAYEPADTALLLDNMKKALKLLKTEL

SEQ ID NO: 199 - protein, 136 aa, Homo sapien
  MISC_FEATURE (110)..(110): x=any amino acid
  MISC_FEATURE (121)..(122): x=any amino acid
  MISC_FEATURE (128)..(128): x=any amino acid
  MISC_FEATURE (136)..(136): x=any amino acid
ARTREVEIAVSADGNTARQSGNRARLHLKKKRKEDSDLYSGIQVSDTTALSENFQNFNELTDSFMKSVHQDQAEKINNFTGSSNGLYEKVLFSSIFYLEILLDSLICLVXPDFSETFFLFXXYPQLTXNLDKIYFX

SEQ ID NO: 200 - protein, 92 aa, Homo sapien
  MISC_FEATURE (4)..(4): x=any amino acid
  MISC_FEATURE (14)..(14): x=any amino acid
  MISC_FEATURE (16)..(16): x=any amino acid
  MISC_FEATURE (22)..(22): x=any amino acid
  MISC_FEATURE (30)..(30): x=any amino acid
  MISC_FEATURE (33)..(33): x=any amino acid
  MISC_FEATURE (40)..(40): x=any amino acid
  MISC_FEATURE (46)..(46): x=any amino acid
  MISC_FEATURE (51)..(51): x=any amino acid
  MISC_FEATURE (56)..(56): x=any amino acid
YVLXSQISAKLFFXLXAIHSLXAIWIKYTXCEXKIGDIYXFLLYVXRSKTXGKLFXEYLYSYGNIAYCTSSIKICSLYDRIHLKTLVILPRL

SEQ ID NO: 201 - protein, 82 aa, Homo sapien
MCFLKTVVVCNIKTMNLISVSTYGFHELASLSHDLLHGFEVIKGLDRQKGLEIFVRLQLQSVSNLKSFLHVVKQQELYLQVS

SEQ ID NO: 202 - protein, 79 aa, Homo sapien
  MISC_FEATURE (1)..(1): x=any amino acid
  MISC_FEATURE (5)..(5): x=any amino acid
  MISC_FEATURE (8)..(9): x=any amino acid
  MISC_FEATURE (12)..(12): x=any amino acid
  MISC_FEATURE (18)..(18): x=any amino acid
  MISC_FEATURE (26)..(26): x=any amino acid
  MISC_FEATURE (32)..(32): x=any amino acid
  MISC_FEATURE (57)..(57): x=any amino acid
XTEGXGDXXSLXFSLQQXESFLHVVXQQSCIXRFVSIETIRISSSDIGSNCQRWVNXDIILGTYWPSGERCCQLFHKPD

SEQ ID NO: 203 - protein, 49 aa, Homo sapien
MEKIPVSAFLLLVALSYTLARDTTVKPGAKKDTKDSRPKTAPDPLQRLG

SEQ ID NO: 204 - protein, 140 aa, Homo sapien
  MISC_FEATURE (102)..(102): x=any amino acid
  MISC_FEATURE (104)..(105): x=any amino acid
  MISC_FEATURE (110)..(110): x=any amino acid
  MISC_FEATURE (119)..(119): x=any amino acid
  MISC_FEATURE (122)..(122): x=any amino acid
  MISC_FEATURE (129)..(129): x=any amino acid
  MISC_FEATURE (136)..(137): x=any amino acid
GNPELPWRKFQCQHSCSLWPSPTLWPEIPQSNLEPKRTQRTLDPKLPQTLSRGWGDQLIWTQTYEEALYKSKTSNKPLMIIHHLDECPHSQALEKVFAENKXIXXLAEQXVLLNLVYEXTDXPFLLMAXMSPGLCXXTHL

SEQ ID NO: 205 - protein, 74 aa, Homo sapien
MDRAAPGRSSRRLTQGRWVRKSRVAMEKIPVSAFLLLVALSYTLARDTTVKPGAKKDTKDSRPKTAPDPLQRLG

SEQ ID NO: 206 - protein, 140 aa, Homo sapien; identical to SEQ ID NO: 204
  MISC_FEATURE (102)..(102): x=any amino acid
  MISC_FEATURE (104)..(105): x=any amino acid
  MISC_FEATURE (110)..(110): x=any amino acid
  MISC_FEATURE (119)..(119): x=any amino acid
  MISC_FEATURE (122)..(122): x=any amino acid
  MISC_FEATURE (129)..(129): x=any amino acid
  MISC_FEATURE (136)..(137): x=any amino acid

SEQ ID NO: 207 - protein, 74 aa, Homo sapien
MDSVVAAEASRRLTQGRWVRKSRVAMEKIPVSAFLLLVALSYTLARDTTVKPGAKKDTKDSRPKTAPDPLQRLG

SEQ ID NO: 208 - protein, 140 aa, Homo sapien; identical to SEQ ID NO: 204
  MISC_FEATURE (102)..(102): x=any amino acid
  MISC_FEATURE (104)..(105): x=any amino acid
  MISC_FEATURE (110)..(110): x=any amino acid
  MISC_FEATURE (119)..(119): x=any amino acid
  MISC_FEATURE (122)..(122): x=any amino acid
  MISC_FEATURE (129)..(129): x=any amino acid
  MISC_FEATURE (136)..(137): x=any amino acid

SEQ ID NO: 209 - protein, 128 aa, Homo sapien
MDSVVAAEVLYKSKTSNKPLMIIHHLDECPHSQALEKVFAENKEIHTHCAEQLVPASHLVYETIVTTHLSPDGQYVPRIMFVDPLSDNLSRYHLEDIPIRLYAYESLQIQLCCLTNMKKAFKLLKTEL

SEQ ID NO: 210 - protein, 84 aa, Homo sapien
  MISC_FEATURE (46)..(46): x=any amino acid
  MISC_FEATURE (48)..(49): x=any amino acid
  MISC_FEATURE (54)..(54): x=any amino acid
  MISC_FEATURE (63)..(63): x=any amino acid
  MISC_FEATURE (66)..(66): x=any amino acid
  MISC_FEATURE (73)..(73): x=any amino acid
  MISC_FEATURE (80)..(81): x=any amino acid
SVMDSVVAAEVLYKSKTSNKPLMIIHHLDECPHSQALEKVFAENKXIXXLAEQXVLLNLVYEXTDXPFLLMAXMSPGLCXXTHL

SEQ ID NO: 211 - protein, 118 aa, Homo sapien
MDWSRPRYPDATDEDITSHMESEELNGAYKAIPVAQDLNAPSDWDSRGKDSYETSQLDDQSAETHSHKQSRLYKRKANDESNEHSDVIDSQELSKVSREFHSHEFHSHEDMLVVDPQK

SEQ ID NO: 212 - protein, 117 aa, Homo sapien
WMSRPRYPDATDEDITSHMESEELNGAYKAIPVAQDLNAPSDWDSRGKDSYETSQLDDQSAETHSHKQSRLYKRKANDESNEHSDVIDSQELSKVSREFHSHEFHSHEDMLVVDPQK

SEQ ID NO: 213 - protein, 75 aa, Homo sapien
MHIQKIFVIITFSKHIVEQMVAFIGLEDNGALQPPPPSAVPGIGPSLQKPFQEYLEAQRQKLHHKSEMGTPQVRL

SEQ ID NO: 214 - protein, 143 aa, Homo sapien
MRSHTAPQPLSGTFLDLLWCNPNWKSNNKNAYPENFCYNNIQQAHSGANGGFHWAGGQWRTATSTSQCCPRHRSISAEAISGVPGGSTAEASPQKRNGHTTGKTLIRFLLPSGKFRAEITFTALTHIFRQISEVGLPVFLDRS

SEQ ID NO: 215 - protein, 113 aa, Homo sapien
GDSEDPRFDPDGPGSSTCALARRRQLGPSQGRSTSRCPSWRVLCRWSQLPSRLYILLRSQSWKMSISFSSVRWASGASRPRSWPGVLDTLGLATTLEPIENGWRKRVRQEAAY

SEQ ID NO: 216 - protein, 210 aa, Homo sapien
MAQVPPGTPRRGLPRHQGLGHATHLHQAVFCWVAEGMRADTTCSPRVAVGTAAEGLLLRVHMWGKEMLQAPRGRARAALRRLAVATRTMAGGCRAPSSAPTVSLPELRSLLASGRARLFDVRSREEAAAGTIPGALNIPVSELESALQMEPAAFQALYSAEKPKLEDEHLVFFCQMGKRGLQATQLARSLGYTGARNYAGAYREWLEKES

SEQ ID NO: 217 - protein, 173 aa, Homo sapien
GQTPRVALGWQWALQQRGCCSESTCGGREMLQAPRGRARAALRRLAVATRTMAGGCRAPSSAPTVSLPELRSLLASGRARLFDVRSREEAAAGTIPGALNIPVSELESALQMEPAAFQALYSAEKPKLEDEHLVFFCQMGKRGLQATQLARSLGYTGARNYAGAYREWLEKES

SEQ ID NO: 218 - protein, 189 aa, Homo sapien
MAQVPPGTPRRGLPRHQGLGHATHLHQAVFCWVAEGMRADTTCSPRVAVGTAAEGLLLRVHMWGKEMLQAPRGRARAALRRLAVATRTMAGAGRARLFDVRSREEAAAGTIPGALNIPVSELESALQMEPAAFQALYSAEKPKLEDEHLVFFCQMGKRGLQATQLARSLGYTGARNYAGAYREWLEKES

SEQ ID NO: 219 - protein, 152 aa, Homo sapien
GQTPRVALGWQWALQQRGCCSESTCGGREMLQAPRGRARAALRRLAVATRTMAGAGRARLFDVRSREEAAAGTIPGALNIPVSELESALQMEPAAFQALYSAEKPKLEDEHLVFFCQMGKRGLQATQLARSLGYTGARNYAGAYREWLEKES

SEQ ID NO: 220 - protein, 105 aa, Homo sapien
MLQAPRGPGRARLFDVRSREEAAAGTIPGALNIPVSELESALQMEPAAFQALYSAEKPKLEDEHLVFFCQMGKRGLQATQLARSLGYTGARNYAGAYREWLEKES

SEQ ID NO: 221 - protein, 112 aa, Homo sapien
RCCRRREDPDGPGSSTCALARRRQLGPSQGRSTSRCPSWRVLCRWSQLPSRLYILLRSQSWKMSISFSSVRWASGASRPRSWPGVLDTLGLATTLEPIENGWRKRVRQEAAY

SEQ ID NO: 222 - protein, 131 aa, Homo sapien
MAAVTPRPPLPEGCRAPSSAPTVSLPELRSLLASGRARLFDVRSREEAAAGTIPGALNIPVSELESALQMEPAAFQALYSAEKPKLEDEHLVFFCQMGKRGLQATQLARSLGYTGARNYAGAYREWLEKES

SEQ ID NO: 223 - protein, 108 aa, Homo sapien [sequence omitted]

SEQ ID NO: 224 - protein, 132 aa, Homo sapien
GKALCHPQIAMAQVPPGTPRRGLPRHQGLGHATHLHQAVFCWVAEGMRADTTCSPRVAVGTAAEGLLLRVHMWGKGDVAGAERAGQGRTPETRGCYAHHGWRYLRGIPGAAVLLVLWVEAWQGVGWRTKGRG

SEQ ID NO: 225 - protein, 162 aa, Homo sapien
MAQVPPGTPRRGLPRHQGLGHATHLHQAVFCWVAEGMRADTTCSPRVAVGTAAEGLLLRVHMWGKEMLQAPRGRARAALRRLAVATRTMAGVSELESALQMEPAAFQALYSAEKPKLEDEHLVFFCQMGKRGLQATQLARSLGYTGARNYAGAYREWLEKES

SEQ ID NO: 226 - protein, 125 aa, Homo sapien
GQTPRVALGWQWALQQRGCCSESTCGGREMLQAPRGRARAALRRLAVATRTMAGVSELESALQMEPAAFQALYSAEKPKLEDEHLVFFCQMGKRGLQATQLARSLGYTGARNYAGAYREWLEKES

SEQ ID NO: 227 - protein, 1815 aa, Homo sapien
MNSLIYNVSNYQSFIVHPSSTSASFEGECEVRQDPRSPSRFLVFFYPEDVRQKVLERKNHELVWQGKGTFKLTVQLPATPDEIDHVFEEELLTKESKTKEDVKEPDVSEELDTKLPLDGGLDKMEDIPEECENISSLVAFENLKANVTDIMLILLVENISGLSNDDFQVEIIRDFDVAVVTFQKHIDTIRFVDDCTKHHSIKQLQLSPRLLEVTNTIRVENLPPGADDYSLKLFFENPYNGGGRVANVEYFPEESSALIEFFDRKVLDTIMATKLDFNKMPLSVFPYYASLGTALYGKEKPLIKLPAPFEESLDLPLWKFLQKKNHLIEEINDEMRRCHCELTWSQLSGKVTIRPAATLVNEGRPRIKTWQADTSTTLSSIRSKYKVNPIKVDPTMWDTIKNDVKDDRILIEFDTLKEMVILAGKSEDVQSIEVQVRELIESTTQKIKREEQSLKEKMIISPGRYFLLCHSSLLDHLLTECPEIEICYDRVTQHLCLKGPSADVYKAKCEIQEKVYTMAQKNIQVSPEIFQFLQQVNWKEFSKCLFIAQKILALYELEGTTVLLTSCSSEALLEAEKQMLSALNYKRIEVENKEVLHGKKWKGLTHNLLKKQNSSPNTVIINELTSETTAEVIITGCVKEVNETYKLLFNFVEQNMKIERLVEVKPSLVIDYLKTEKKLFWPKIKKVNVQVSFNPENKQKGILLTGSKTEVLKAVDIVKQVWDSVCVKSVHTDKPGAKQFFQDKARFYQSEIKRLFGCYIELQENEVMKEGGSPAGQKCFSRTVLAPGVVLIVQQGDLARLPVDVVVNASNEDLKHYGGLAAALSKAAGPELQADCDQIVKREGRLLPGNATISKAGKLPYHHVIHAVGPRWSGYEAPRCVYLLRRAVQLSLCLAEKYKYRSIAIPAISSGVFGFPLGRCVETIVSAIKENFQFKKDGHCLKEIYLVDVSEKTVEAFAEAVKTVFKATLPDTAAPPGLPPAAAGPGKTSWEKGSLVSPGGLQMLLVKEGVQNAKTDVVVNSVPLDLVLSRGPLSKSLLEKAGPELQEELDTVGQGVAVSMGTVLKTSSWNLDCRYVLHVVAPEWRNGSTSSLKIMEDIIRECMEITESLSLKSIAFPAIGTGNLGFPKNIFAELIISEVFKFSSKNQLKTLQEVHFLLHPSDHENIQAFSDEFARRANGNLVSDKIPKAKDTQGFYGTVSSPDSGVYEMKIGSIIFQVASGDITKEEADVIVNSTSNSFNLKAGVSKAILECAGQNVERECSQQAQQRKNDYIITGGGFLRCKNIIHVIGGNDVKSSVSSVLQECEKKNYSSICLPAIGTGNAKQHPDKVAEAIIDAIEDFVQKGSAQSVKKVKVVIFLPQVLDVFYANMKKREGTQLSSQQSVMSKLACEFFVFMKCMFITLMSHVKYLIFLFFLAFLGFSKQSPQKKNHLVLEKKTESATFRVCGENVTCVEYAISWLQDLIEKEQCPYTSEDECIKDFDEKEYQELNELQKKLNINISLDHKRPLIKVLGISRDVMQARDEIEAMIKRVRLAKEQESRADCISEFIEWQYNDNNTSHCFNKMTNLKLEDARREKKKTVDVKINHRHYTVNLNTYTATDTKGHSLSVQRLTKSKVDIPAHWSDMKQQNFCVVELLPSDPEYNTVASKFNQTCSHFRIEKIERIQNPDLWNSYQAKKKTMDAKNGQTMNEKQLFHGTDAGSVPHVNRNGFNRSYAGKNAVAYGKGTYFAVNANYSANDTYSRPDANGRKHVYYVRVLTGIYTHGNHSLIVPPSKNPQNPTDLYDTVTDNVHHPSLFVAFYDYQAYPEYLITFRK

SEQ ID NO: 228 - protein, 1744 aa, Homo sapien
MNSLIYNVSNYQSFIVHPSSTSASFEGECEVRQDPRSPSRFLVFFYPEDVRQKVLERKNHELVWQGKGTFKLTVQLPATPDEIDHVFEEELLTKESKTKEDVKEPDVSEELDTKLPLDGGLDKMEDIPEECENISSLVAFENLKANVTDIMLILLVENISGLSNDDFQVEIIRDFDVAVVTFQKHIDTIRFVDDCTKHHSIKQLQLSPRLLEVTNTIRVENLPPGADDYSLKLFFENPYNGGGRVANVEYFPEESSALIEFFDRKVLDTIMATKLDFNKMPLSVFPYYASLGTALYGKEKPLIKLPAPFEESLDLPLWKFLQKKNHLIEEINDEMRRCHCELTWSQLSGKVTIRPAATLVNEGRPRIKTWQADTSTTLSSIRSKYKVNPIKVDPTMWDTIKNDVKDDRILIEFDTLKEMVILAGKSEDVQSIEVQVRELIESTTQKIKREEQSLKEKMIISPGRYFLLCHSSLLDHLLTECPEIEICYDRVTQHLCLKGPSADVYKAKCEIQEKVYTMAQKNIQVSPEIFQFLQQVNWKEFSKCLFIAQKILALYELEGTTVLLTSCSSEALLEAEKQMLSALNYKRIEVENKEVLHGKKWKGLTHNLLKKQNSSPNTVIINELTSETTAEVIITGCVKEVNETYKLLFNFVEQNMKIERLVEVKPSLVIDYLKTEKKLFWPKIKKVNVQVSFNPENKQKGILLTGSKTEVLKAVDIVKQVWDSVCVKSVHTDKPGAKQFFQDKARFYQSEIKRLFGCYIELQENEVMKEGGSPAGQKCFSRTVLAPGVVLIVQQGDLARLPVDVVVNASNEDLKHYGGLAAALSKAAGPELQADCDQIVKREGRLLPGNATISKAGKLPYHHVIHAVGPRWSGYEAPRCVYLLRRAVQLSLCLAEKYKYRSIAIPAISSGVFGFPLGRCVETIVSAIKENFQFKKDGHCLKEIYLVDVSEKTVGPLQMLLVKEGVQNAKTDVVVNSVPLDLVLSRGPLSKSLLEKAGPELQEELDTVGQGVAVSMGTVLKTSSWNLDCRYVLHVVAPEWRNGSTSSLKIMEDIIRECMEITESLSLKSIAFPAIGTGNLGFPKNIFAELIISEVFKFSSKNQLKTLQEVHFLLHPSDHENIQAFSDEFARRANGNLVSDKIPKAKDTQGFYGTVSSPDSGVYEMKIGSIIFQVASGDITKEEADVIVNSTSNSFNLKAGVSKAILECAGQNVERECSQQAQQRKNDYIITGGGFLRCKNIIHVIGGNDVKSSVSSVLQECEKKNYSSICLPAIGTGNAKQHPDKVAEAIIDAIEDFVQKGSAQSVKKVKVVIFLPQVLDVFYANMKKREGTQLSSQQSVMSKLASFLGFSKQSPQKKNHLVLEKKTESATFRVCGENVTCVEYAISWLQDLIEKEQCPYTSEDECIKDFDEKEYQELNELQKKLNINISLDHKRPLIKVLGISRDVMQARDEIEAMIKRVRLAKEQESRADCISEFIEWQYNDNNTSHCFNKMTNLKLEDARREKKKTVDVKINHRHYTVNLNTYTATDTKGHSLSVQRLTKSKVDIPAHWSDMKQQNFCVVELLPSDPEYNTVASKFNQTCSHFRIEKIERIQNPDLWNSYQAKKKTMDAKNGQTMNEKQLFHGTDAGSVPHVNRNGFNRSYAGKNAVAYGKGTYFAVNANYSANDTYSRPDANGRKHVYYVRVLTGIYTHGNHSLIVPPSKNPQNPTDLYDTVTDNVHHPSLFVAFYDYQAYPEYLITFRK

SEQ ID NO: 229 - protein, 968 aa, Homo sapien
NSLIYNVSNYQSFIVHPSSTSASFEGECEVRQDPRSPSRFLVFFYPEDVRQKVLERKNHELVWQGKGTFKLTVQLPATPDEIDHVFEEELLTKESKTKEDVKEPDVSEELDTKLPLDGGLDKMEDIPEECENISSLVAFENLKANVTDIMLILLVENISGLSNDDFQVEIIRDFDVAVVTFQKHIDTIRFVDDCTKHHSIKQLQLSPRLLEVTNTIRVENLPPGADDYSLKLFFENPYNGGGRVANVEYFPEESSALIEFFDRKVLDTIMATKLDFNKMPLSVFPYYASLGTALYGKEKPLIKLPAPFEESLDLPLWKFLQKKNHLIEEINDEMRRCHCELTWSQLSGKVTIRPAATLVNEGRPRIKTWQADTSTTLSSIRSKYKVNPIKVDPTMWDTIKNDVKDDRILIEFDTLKEMVILAGKSEDVQSIEVQVRELIESTTQKIKREEQSLKEKMIISPGRYFLLCHSSLLDHLLTECPEIEICYDRVTQHLCLKGPSADVYKAKCEIQEKVYTMAQKNIQVSPEIFQFLQQVNWKEFSKCLFIAQKILALYELEGTTVLLTSCSSEALLEAEKQMLSALNYKRIEVENKEVLHGKKWKGLTHNLLKKQNSSPNTVIINELTSETTAEVIITGCVKEVNETYKLLFNFVEQNMKIERLVEVKPSLVIDYLKTEKKLFWPKIKKVNVQVSFNPENKQKGILLTGSKTEVLKAVDIVKQVWDSVCVKSVHTDKPGAKQFFQDKARFYQSEIKRLFGCYIELQENEVMKEGGSPAGQKCFSRTVLAPGVVLIVQQGDLARLPVDVVVNASNEDLKHYGGLAAALSKAAGPELQADCDQIVKREGRLLPGNATISKAGKLPYHHVIHAVGPRWSGYEAPRCVYLLRRAVQLSLCLAEKYKYRSIAIPAISSGVFGFPLGRCVETIVSAIKENFQFKKDGHCLKEIYLVDVSEKTVEAFADAVGERGCAEC

SEQ ID NO: 230 - protein, 968 aa, Homo sapien; identical to SEQ ID NO: 229

SEQ ID NO: 231 - protein, 968 aa, Homo sapien; identical to SEQ ID NO: 229

SEQ ID NO: 232 - protein, 1744 aa, Homo sapien; identical to SEQ ID NO: 228

SEQ ID NO: 233 - protein, 968 aa, Homo sapien; identical to SEQ ID NO: 229

SEQ ID NO: 234 - protein, 282 aa, Homo sapien
MQRLRWLRDWKSSGRGLTAAKEPGARSSPLQAMRILQLILLALATGLVGGETRIIKGFECKPHSQPWQAALFEKTRLLCGATLIAPRWLLTAAHCLKPRYIVHLGQHNLQKEEGCEQTRTATESFPHPGFNNSLPNKDHRNDIMLVKMASPVSITWAVRPLTLSSRCVTAGTSCLISGWGSTSSPQLRLPHTLRCANITIIEHQKCENAYPGNITDTMVCASVQEGGKDSCQGDSGGPLVCNQSLQGIISWGQDPCAITRKPGVYTKVCKYVDWIQETMKNN

SEQ ID NO: 235 - protein, 221 aa, Homo sapien
RGWKQSDVSSSSKVSLTSPTHVSPDLSSSNYCLSHLSRYIVHLGQHNLQKEEGCEQTRTATESFPHPGFNNSLPNKDHRNDIMLVKMASPVSITWAVRPLTLSSRCVTAGTSCLISGWGSTSSPQLRLPHTLRCANITIIEHQKCENAYPGNITDTMVCASVQEGGKDSCQGDSGGPLVCNQSLQGIISWGQDPCAITRKPGVYTKVCKYVDWIQETMKNN

SEQ ID NO: 236 - protein, 34 aa, Homo sapien
LGTRGHFHESPRKPGVYTKVCKYVDWIQETMKNN

SEQ ID NO: 237 - protein, 58 aa, Homo sapien
ARYPWTFPRVTPKAWCLHESLQICGLDPGDDEEQLDWTHPPQPITLHFHLVFGSCSLC

SEQ ID NO: 238 - protein, 140 aa, Homo sapien
GPQELHHRWWSGWLRPWSFCAWICIFIALLVETPRPVHPAKTPQAACGSRTLPPFPRCPLRARAATQACWLRPPLGQALAQPAEWGVVGQSPRSWAPAQAHRARPHPAAPRTATRGVLPLCPAPGTNSMFGVCLCLFFKK

SEQ ID NO: 239 - protein, 151 aa, Homo sapien
RPPGLSTLPRLLRQRVGPALCPHFPDVPCGRGQPPKPAGCGPLSARHWLSPLSGGSWASPRGAGPLHRHTGPGHTQRPPAQPPVGCCPYARRRAPTPCLVFVCVCFSRNDSNCCLDFEIYCNCQCTRLDPVSFLHQFGKNAALSLPQLNRM

SEQ ID NO: 240 - protein, 402 aa, Homo sapien
MRLLSQEWGRRKTWAENSAPSVCPPAPPPGLEKLPFRGSQEVKWPTQLLCRGRPGTSFSFSVHLYTFPLFSLHFPQKSLPLLENQIKETHQRITEELQKYGVDIPEDENEKMFFLIDKINAFNQDITALMQGEETVGEEDIRLFTRLRHEFHKWSTIIENNFQEGHKILSRKIQKFENQYRGRELPGFVNYRTFETIVKQQIKALEEPAVDMLHTVTDMVRLAFTDVSIKNFEEFFNLHRTAKSKIEDIRAEQEREGEKLIRLHFQMEQIVYCQDQVYRGALQKVREKELEEEKKKKSWDFGAFQSSSATDSSMEEIFQHLMAYHQEASKRISSHIPLIIQFFMLQTYGQQLQKAMLQLLQDKDTYSWLLKERSDTSDKRKFLKERLARLTQARRRLAQFPG

SEQ ID NO: 241 - protein, 155 aa, Homo sapien
KESLYHKKVLDYVICVCAASGVLFPNPRIGDHFNQFGHQENCQNEEILNSLKYVRPGGGYQPTFTLVQKCEVNGQNEHPVFAYLKDKLPYPYDDPFSLMTDPKLIIWSPVRRSDVAWNFEKFLIGPEGEPFRRYSRTFPTINIEPDIKRLLKVAI

SEQ ID NO: 242 - protein, 133 aa, Homo sapien
  MISC_FEATURE (1)..(4): x=any amino acid
XXXXPRIGDHFNQFGHQENCQNEEILNSLKYVRPGGGYQPTFTLVQKCEVNGQNEHPVFAYLKDKLPYPYDDPFSLMTDPKLIIWSPVRRSDVAWNFEKFLIGPEGEPFRRYSRTFPTINIEPDIKRLLKVAI

SEQ ID NO: 243 - protein, 126 aa, Homo sapien
MTSVPSAWMGENCQNEEILNSLKYVRPGGGYQPTFTLVQKCEVNGQNEHPVFAYLKDKLPYPYDDPFSLMTDPKLIIWSPVRRSDVAWNFEKFLIGPEGEPFRRYSRTFPTINIEPDIKRLLKVAI

SEQ ID NO: 244 - protein, 150 aa, Homo sapien
MTLGRECRRVKEFHVVDLSLPPPTVHALCLFPPQENCQNEEILNSLKYVRPGGGYQPTFTLVQKCEVNGQNEHPVFAYLKDKLPYPYDDPFSLMTDPKLIIWSPVRRSDVAWNFEKFLIGPEGEPFRRYSRTFPTINIEPDIKRLLKVAI

SEQ ID NO: 245 - protein, 186 aa, Homo sapien
MESQEPTESSQNGKQYIISEELISEGKWVKLEKTTYMDPTGKTRTWESVKRTTRKEQTADGVAVIPVLQRTLHYECIVLVKQFRPPMGGYCIEFPAGLIDDGETPEAAALRELEEETGYKGDIAECSPAVCMDPGLSNCTIHIVTVTINGDDAENARPKPKPGDGCVSAVMKVVWLHYVSWNLLLV

SEQ ID NO: 246 - protein, 191 aa, Homo sapien
MLLADQGQSWKEEVVTVETWQEGSLKASCLYGQLPKFQDGDLTLYQSNTILRHLGRTLGLYGKDQQEAALVDMVNDGVEDLRCKYISLIYTNYEAGKDDYVKALPGQLKPFETLLSQNQGGKTFIVGDQISFADYNLLDLLLIHEVLAPGCLDAFPLLSAYVGRLSARPKLKAFLASPEYVNLPINGNGKQ

SEQ ID NO: 247 - protein, 146 aa, Homo sapien
MLLADQGQSWKEEVVTVETWQEGSLKASCLYGQLPKFQDGDLTLYQSNTILRHLGRTLGLYGKDQQEAALVDMVNDGVEDLRCKYISLIYTNYEAGKDDYVKALPGQLKPFETLLSQNQGGKTFIVGDQISFADYKLRTRRYRARF

SEQ ID NO: 248 - protein, 179 aa, Homo sapien
  MISC_FEATURE (172)..(172): x=any amino acid
RSRTGRVGAAVFATMPPYTVVYFPVRGRCAALRMLLADQGQSWKEEVVTVETWQEGSLKASCLYGQLPKFQDGDLTLYQSNTILRHLGRTLGLYGKDQQEAALVDMVNDGVEDLRCKYISLIYTNYEAGKDDYVKALPGQLKPFETLLSQNQGGKTFIVGDQISFADYKLRXRRYRARF

SEQ ID NO: 249 - protein, 191 aa, Homo sapien; identical to SEQ ID NO: 246

SEQ ID NO: 250 - protein, 236 aa, Homo sapien
GSEAARLRWSFAAAVFATTNFSLFATMPPYTVVYFPVRGRCAALRMLLADQGQSWKEEVVTVETWQEGSLKASCLYGQLPKFQDGDLTLYQSNTILRHLGRTLGLYGKDQQEAALVDMVNDGVEDLRCKYISLIYTNYEAGKDDYVKALPGQLKPFETLLSQNQGGKTFIVGDQISFADYNLLDLLLIHEVLAPGCLDAFPLLSAYVGRLSARPKLKAFLASPEYVNLPINGNGKQ

SEQ ID NO: 251 - protein, 291 aa, Homo sapien
MSQGPGVPTGSGRYPWVLCWYCLVLELLLALGRAVLGPSGWLGSGPPSGEHTCLGGSAVGPFSAPSQVGFEVLPGAACLQGPPVLLGSAGGQVSDSRGFLSSPPCRPTPWSISQFEAAARPWRMLLADQGQSWKEEVVTVETWQEGSLKASCLYGQLPKFQDGDLTLYQSNTILRHLGRTLGLYGKDQQEAALVDMVNDGVEDLRCKYISLIYTNYEAGKDDYVKALPGQLKPFETLLSQNQGGKTFIVGDQISFADYNLLDLLLIHEVLAPGCLDAFRPSSRPSWPPLST

SEQ ID NO: 252 - protein, 302 aa, Homo sapien
DPGVAAGRAGRMSQGPGVPTGSGRYPWVLCWYCLVLELLLALGRAVLGPSGWLGSGPPSGEHTCLGGSAVGPFSAPSQVGFEVLPGAACLQGPPVLTGLRRGAGFRLPGLLVFATMPPYTVVYFPVRGRCAALRMLLADQGQSWKEEVVTVETWQEGSLKASCLYGQLPKFQDGDLTLYQSNTILRHLGRTLGLYGKDQQEAALVDMVNDGVEDLRCKYISLIYTNYEAGKDDYVKALPGQLKPFETLLSQNQGGKTFIVGDQISFADYNLLDLLLIHEVLAPGCLDAFRPSSRPSWPPLST

SEQ ID NO: 253 - protein, 226 aa, Homo sapien
MSQGPGVPTGSGRYPWVLCWYCLVLELLLALGRAVLGPSGWLGSGPPSGEHTCLGGSAVGPFSAPSQVGFEVLPGAACLQGPPVLLGSAGGQVSDSRGFLSSPPCRPTPWSISQFEAAARPWRMLLADQGQSWKEEVVTVETWQEGSLKASCLYGQLPKFQDGDLTLYQSNTILRHLGRTLGLYGKDQQEAALVDMVNDGVEDLRCKYISLIYTNYAQAQGLPGLP

SEQ ID NO: 254 - protein, 237 aa, Homo sapien
DPGVAAGRAGRMSQGPGVPTGSGRYPWVLCWYCLVLELLLALGRAVLGPSGWLGSGPPSGEHTCLGGSAVGPFSAPSQVGFEVLPGAACLQGPPVLTGLRRGAGFRLPGLLVFATMPPYTVVYFPVRGRCAALRMLLADQGQSWKEEVVTVETWQEGSLKASCLYGQLPKFQDGDLTLYQSNTILRHLGRTLGLYGKDQQEAALVDMVNDGVEDLRCKYISLIYTNYAQAQGLPGLP

SEQ ID NO: 255 - protein, 129 aa, Homo sapien
  MISC_FEATURE (17)..(17): x=any amino acid
  MISC_FEATURE (22)..(22): x=any amino acid
  MISC_FEATURE (31)..(31): x=any amino acid
  MISC_FEATURE (41)..(41): x=any amino acid
  MISC_FEATURE (55)..(55): x=any amino acid
  MISC_FEATURE (64)..(64): x=any amino acid
  MISC_FEATURE (66)..(66): x=any amino acid
  MISC_FEATURE (83)..(83): x=any amino acid
  MISC_FEATURE (114)..(114): x=any amino acid
  MISC_FEATURE (117)..(117): x=any amino acid
  MISC_FEATURE (129)..(129): x=any amino acid
AGLPGRGGGQAKVNKTXRGGCXHAPGGLIAXSVESAPRYSXGPALLPRQPLKDSXQGGTGQAGXRXSQNLTRCAGRGRGLGAXFAPSPGNGCARKEYCRHLNGLPGIFKQKAKXCCXKSIADQASRFLX

SEQ ID NO: 256 - protein, 134 aa, Homo sapien
  MISC_FEATURE (17)..(17): x=any amino acid
  MISC_FEATURE (22)..(22): x=any amino acid
  MISC_FEATURE (31)..(31): x=any amino acid
  MISC_FEATURE (39)..(39): x=any amino acid
  MISC_FEATURE (41)..(41): x=any amino acid
  MISC_FEATURE (55)..(55): x=any amino acid
  MISC_FEATURE (64)..(64): x=any amino acid
  MISC_FEATURE (66)..(66): x=any amino acid
  MISC_FEATURE (83)..(83): x=any amino acid
  MISC_FEATURE (114)..(114): x=any amino acid
  MISC_FEATURE (117)..(117): x=any amino acid
  MISC_FEATURE (129)..(129): x=any amino acid
AGLPGRGGGQAKVNKTXRGGCXHAPGGLIAXSVESAPRXSXGPALLPRQPLKDSXQGGTGQAGXRXSQNLTRCAGRGRGLGAXFAPSPGNGCARKEYCRHLNGLPGIFKQKAKXCCXKSIADQASRFLXIFFIS

SEQ ID NO: 257 - protein, 128 aa, Homo sapien
  MISC_FEATURE (7)..(7): x=any amino acid
  MISC_FEATURE (20)..(20): x=any amino acid
  MISC_FEATURE (23)..(23): x=any amino acid
  MISC_FEATURE (28)..(28): x=any amino acid
  MISC_FEATURE (31)..(31): x=any amino acid
  MISC_FEATURE (35)..(35): x=any amino acid
  MISC_FEATURE (43)..(45): x=any amino acid
  MISC_FEATURE (58)..(58): x=any amino acid
  MISC_FEATURE (60)..(60): x=any amino acid
  MISC_FEATURE (115)..(115): x=any amino acid
  MISC_FEATURE (121)..(122): x=any amino acid
  MISC_FEATURE (124)..(124): x=any amino acid
  MISC_FEATURE (126)..(126): x=any amino acid
  MISC_FEATURE (128)..(128): x=any amino acid
TRQPDAXDGDSYDPYDFSDXEEXNAIKXTLXKTAXSQETKESXXXELSESRLKAFKVXLXDVFREAHAQSIGMNRLTESINRDSEEPFSSVEIQAALSKMQDDNQVMVSEGIIWXVGGGVXXGXGXCX

SEQ ID NO: 258 - protein, 120 aa, Homo sapien
  MISC_FEATURE (1)..(2): x=any amino acid
  MISC_FEATURE (9)..(9): x=any amino acid
  MISC_FEATURE (12)..(12): x=any amino acid
  MISC_FEATURE (16)..(16): x=any amino acid
  MISC_FEATURE (24)..(26): x=any amino acid
  MISC_FEATURE (39)..(39): x=any amino acid
  MISC_FEATURE (41)..(41): x=any amino acid
  MISC_FEATURE (96)..(96): x=any amino acid
  MISC_FEATURE (102)..(103): x=any amino acid
  MISC_FEATURE (105)..(105): x=any amino acid
  MISC_FEATURE (107)..(107): x=any amino acid
  MISC_FEATURE (109)..(109): x=any amino acid
  MISC_FEATURE (120)..(120): x=any amino acid
XXGGKCLKXTLXKTAXSQETKESXXXELSESRLKAFKVXLXDVFREAHAQSIGMNRLTESINRDSEEPFSSVEIQAALSKMQDDNQVMVSEGIIWXVGGGVXXGXGXCXESLFCVSHASX

SEQ ID NO: 259 - protein, 254 aa, Homo sapien
MRIAVICFCLLGITCAIPVKQADSGSSEEKQLYNKYPDAVATWLNPDPSQKQNLLAPQNAVSSEETNDFKQETLPSKSNESHDHMDDMDDEDDDDHVDSQDSIDSNDSDDVDDTDDSHQSDESHHSDESDELVTDFPTDLPATEVFTPVVPTVDTYDGRGDSVVMDLRSKSKKLRRPEYSTLMLQTRTSAHNGKRGVDMVHTRAPRGQTDTAPRAAGHANTKSSADQPNRDRHKTADEKEPEDETQRSATEGHK

SEQ ID NO: 260 - protein, 212 aa, Homo sapien
ASLVTSSNYISRKLEEEAEHSIVGTRLVSGQLQPSQPNADQGKLTTMRIAVICFCLLGITCAIPVKQADSGSSEEKQLYNKYPDAVATWLNPDPSQKQNLLAPQNAVSSEETNDFKQETLPSKSNESHDHMDDMDDEDDDDHVDSQDSIDSNDSDDVDDTDDSHQSDESHHSDESDELVTDFPTDLPATEVFTPVVPTVDTYDGRGDSVVMD

SEQ ID NO: 261 - protein, 240 aa, Homo sapien
MRIAVICFCLLGITCAIPVKQADSGSSEEKQLYNKYPDAVATWLNPDPSQKQNLLAPQTLPSKSNESHDHMDDMDDEDDDDHVDSQDSIDSNDSDDVDDTDDSHQSDESHHSDESDELVTDFPTDLPATEVFTPVVPTVDTYDGRGDSVVMDLRSKSKKLRRPEYSTLMLQTRTSAHNGKRGVDMVHTRAPRGQTDTAPRAAGHANTKSSADQPNRDRHKTADEKEPEDETQRSATEGHK

SEQ ID NO: 262 - protein, 198 aa, Homo sapien
ASLVTSSNYISRKLEEEAEHSIVGTRLVSGQLQPSQPNADQGKLTTMRIAVICFCLLGITCAIPVKQADSGSSEEKQLYNKYPDAVATWLNPDPSQKQNLLAPQTLPSKSNESHDHMDDMDDEDDDDHVDSQDSIDSNDSDDVDDTDDSHQSDESHHSDESDELVTDFPTDLPATEVFTPVVPTVDTYDGRGDSVVMD

SEQ ID NO: 263 - protein, 170 aa, Homo sapien
MDDMDDEDDDDHVDSQDSIDSNDSDDVDDTDDSHQSDESHHSDESDELVTDFPTDLPATEVFTPVVPTVDTYDGRGDSVVMDLRSKSKKLRRPEYSTLMLQTRTSAHNGKRGVDMVHTRAPRGQTDTAPRAAGHANTKSSADQPNRDRHKTADEKEPEDETQRSATEGHK

SEQ ID NO: 264 - protein, 137 aa, Homo sapien
ASPVPYQLNRLILEVLRDPSQKQNLLAPQNAVSSEETNDFKQETLPSKSNESHDHMDDMDDEDDDDHVDSQDSIDSNDSDDVDDTDDSHQSDESHHSDESDELVTDFPTDLPATEVFTPVVPTVDTYDGRGDSVVMD

SEQ ID NO: 265 - protein, 156 aa, Homo sapien
MVTPPSPPKSPPCMQGIEGSCRGDPVRPSAICPPRLLDVGVGMSHPPAASHGTSGTPELPTWRLLVCEEPVVPVPAGTGLGLVRPWGLRLVFLCLDLHIYCIAGRDPQACPPCQDSSGSVWVPHSAPISPMSPAGAGSHPSLLAAAPSRPGIGSAR

SEQ ID NO: 266 - protein, 195 aa, Homo sapien
RVLPVRPCPAQCHLPPEAARCRCRHVPPTRRLPRTSGTPELPTWRLLVCEEPVVPVPAGTGLGLVRPGVCAWSFCAWICIFIALLVETPRPVHPAKTPQAACGSRTLPPFPRCPLRARAATQACWLRPPLGQALAQPAEWGVVGQSPRSWAPAQAHRARPHPAAPRTATRGVLPLCPAPGTNSMFGVCLCLFFKK

SEQ ID NO: 267 - protein, 376 aa, Homo sapien
MSILKIHAREIFDSRGNPTVEVDLFTSKGLFRAAVPSGASTGIYEALELRDNDKTRYMGKGVSKAVEHINKTIAPALVSKKLNVTEQEKIDKLMIEMDGTENKSKFGANAILGVSLAVCKAGAVEKGVPLYRHIADLAGNSEVILPVPAFNVINGGSHAGNKLAMQEFMILPVGAANFREAMRIGAEVYHNLKNVIKEKYGKDATNVGDEGGFAPNILENKEGLELLKTAIGKAGYTDKVVIGMDVAASEFFRSGKYDLDFKSPDDPSRYISPDQLADLYKSFIKDYPVVSIEDPFDQDDWGAWQKFTASAGIQVVGDDLTVTNPKRIAKAREREVLQLPPAQSQPDWLRDRVSSGVQAGPGQWLGRHGVSSFGGD

SEQ ID NO: 268 - protein, 404 aa, Homo sapien
MSILKIHAREIFDSRGNPTVEVDLFTSKGLFRAAVPSGASTGIYEALELRDNDKTRYMGKGVSKAVEHINKTIAPALVSKKLNVTEQEKIDKLMIEMDGTENKSKFGANAILGVSLAVCKAGAVEKGVPLYRHIADLAGNSEVILPVPAFNVINGGSHAGNKLAMQEFMILPVGAANFREAMRIGAEVYHNLKNVIKEKYGKDATNVGDEGGFAPNILENKEGLELLKTAIGKAGYTDKVVIGMDVAASEFFRSGKYDLDFKSPDDPSRYISPDQLADLYKSFIKDYPVVSIEDPFDQDDWGAWQKFTASAGIQVVGDDLTVTNPKRIAKAREREVLQLPPAQSQPDWLRDQLADLYKSFIKDYPVVSIEDPFELPGALLAALALQSCNWPKSLFFSPHFPPSV

SEQ ID NO: 269 - protein, 113 aa, Homo sapien
MTTSQKHRDFVAEPMGEKPVGSLAGIGEVLGKKLEERGFDKVWGGCVYLVQAAGGREVIPSAGGWTVRYNLKRLPEPGHLVERRGGQNPRCFLGLCALNGTGMAVLLLSLTEH

SEQ ID NO: 270 - protein, 30 aa, Homo sapien
TRGSTDAWVDPRVRQMTDLVTPPANIQSGM

SEQ ID NO: 271 - protein, 66 aa, Homo sapien
PTWSLLLPTFSLVCEACVKQELLELQGQGAIIPAWESWKTSCRSQRSILTLKMGRMFFLRTNSFVF

SEQ ID NO: 272 - protein, 249 aa, Homo sapien
MTTTIRQFTSSSSIKGSSGLGGGSSRTSCRLSGGLGAGSCRLGSAGGLGSTLGGSSYSSCYSFGSGGGYGSSFGGVDGLLAGGEKATMQNLNDRLASYLDKVRALEEANTELEVKIRDWYQRQAPGPARDYSQYYRTIEELQNKILTATVDNANILLQIDNARLAADDFRTKFETEQGLRLSVEADINGLRQGAGEEWPWQKRDREMRNGRTQGEPATEENPGGDETLKPGGGDTAGWPPQGGGANQIG

SEQ ID NO: 273 - protein, 247 aa, Homo sapien
  MISC_FEATURE (221)..(221): x=any amino acid
PTQLGAPLLSSPSPVCLPPAAATMTTTIRQFTSSSSIKGSSGLGGGSSRTSCRLSGGLGAGSCRLGSAGGLGSTLGGSSYSSCYSFGSGGGYGSSFGGVDGLLAGGEKATMQNLNDRLASYLDKVRALEEANTELEVKIRDWYQRQAPGPARDYSQYYRTIEELQNKILTATVDNANILLQIDNARLAADDFRTKFETEQGLRLSVEADINGLRQGAGKMXLAEAGPGDAKWENPRGAGYGRKPRGG

SEQ ID NO: 274 - protein, 156 aa, Homo sapien [sequence omitted]

SEQ ID NO: 275 - protein, 295 aa, Homo sapien
MQFVNVGYFLIAAGVVVFALGFLGCYGAKTESKCALVTVCETQLHRLMTKSPLALDTRPWDSQTLLWTPLGSGFCLTFPGGGLGQGGHEGLSLPKTQTPVPHSFFFILLLIFIAEVAAAVVALVYTTMVRHWDGGREEDWAKPWEWAVACEWPPSVPAPKHWPAFTQAEHFLTLLVVPAIKKDYGSQEDFTQVWNTTMKGLKCCGFTNYTDFEDSPYFKENSAFPPFCCNDNVTNTANETCTKQKAHDQKVEGCFNQLLYDIRTNAVTVGGVAAGIGGLELAAMIVSMYLYCNLQ

SEQ ID NO: 276 - protein, 207 aa, Homo sapien
PLSPQLCGAALLAVGIWVSIDGASFLKIFGPLSSSAMQFVNVGYFLIAAGVVVFALGFLGCYGAKTESKCALVTVCETQLHRLMTKSPLALDTRPWDSQTLLWTPLGSGFCLTFPGGGLGQGGHEGLSLPKTQTPVPHSFFFILLLIFIAEVAAAVVALVYTTMVRHWDGGREEDWAKPWEWAVACEWPPSVPAPKHWPASPRLSTS

SEQ ID NO: 277 - protein, 110 aa, Homo sapien
GRLLLLNSRPRRLKGLKCCGFTNYTDFEDSPYFKENSAFPPFCCNDNVTNTANETCTKQKAHDQKVEGCFNQLLYDIRTNAVTVGGVAAGIGGLELAAMIVSMYLYCNLQ

SEQ ID NO: 278 - protein, 110 aa, Homo sapien
  MISC_FEATURE (14)..(14): x=any amino acid
GRLLLLNSRPRRLXGLKCCGFTNYTDFEDSPYFKENSAFPPFCCNDNVTNTANETCTKQKAHDQKVEGCFNQLLYDIRTNAVTVGGVAAGIGGLELAAMIVSMYLYCNLQ

SEQ ID NO: 279 - protein, 156 aa, Homo sapien [sequence omitted]

SEQ ID NO: 280 - protein, 171 aa, Homo sapien
MLERRIVMDAWSRPRYCFGLVYYVLVGLTVLSQVPMDGRNAYITGKNLLMQARWFHILGMMMFIWSSAHQYKCHVILGNLRKNKAGVVIHCNHRIPFGDWFEYVSSPNYLAELMIYVSMAVTFGFHNLTWWLVVTNVFFNQALSAFLSHQFYKSKFVSYPKHRKAFLPFLF

SEQ ID NO: 281 - protein, 101 aa, Homo sapien
MITHGSDTGKKRIRRGGNILVAKEHPRTIRAVGAPNNVVGDTDHPHRRDYIRAPLEPRTIMQILRRGYCGRLNRQAASNGDPAGRRLGDSGKRRLSHLFSR

SEQ ID NO: 282 - protein, 120 aa, Homo sapien
IKSETSTTSLKWAESLLLTLDLEKPVSLLLSVTNLYSKNSAQFSTILQTLSFPATFTPSPSIPLSSAYFFFFSDRVSLCRPGRSAVAQSWAHCSLNLPGSSDSPASAPQVAGTTSAHHHA

SEQ ID NO: 283 - protein, 386 aa, Homo sapien
NLDWAGPLLCHLKGLGHASLSSWETLTGSLGSQSIKWRRFLPSEPTLLGFSGQISPGPGSARRGTGPPSASDLRAPGHSPGHSPAHLPRPRPPRAPAGSAPAICPTGRAPSWPAPARHDRCPPLAFLTQGLRWLRSPGSCRQGQEGSGTWKMRPLAGGLLKVVFVVFASLCAWYSGYLLAELIPDAPLSSAAYSIRSIGERPVLKAPVPKRQKCDHWTPCPSDTYAYRLLSGGGRSKYAKICFEDNLLMGEQLGNVARGINIAIVNYVTGNVTATRCFDMYEGDNSGPMTKFIQSAAPKSLLFMVTYDDGSTRLNNDAKNAIEALGSKEIRNMKFRSSWVFIAAKGLELPSEIQREKINHSDAKNNRYSGWPAEIQIEGCIPKERS

SEQ ID NO: 284 - protein, 296 aa, Homo sapien
NLDWAGPLLCHLKGLGHASLSSWETLTGSLGSQSIKWRRFLPSEPTLLGFSGQISPGPGSARRGTGPPSASDLRAPGHSPGHSPAHLPRPRPPRAPAGSAPAICPTGRAPSWPAPARHDRCPPLAFLTQGLRWLRSPGSCRQGQEGSGTWKMRPLAGGLLKVVFVVFASLCAWYSGYLLAELIPDAPLSSAAYSIRSIGERPVLKAPVPKRQKCDHWTPCPSDTYAYRLLSGGGRSKYAKICFEDNLLMGEQLGNVARGINIAIVNYVTGNVTATRCFDMYEGVFLDGLSFLGTDS

SEQ ID NO: 285 - protein, 338 aa, Homo sapien
NLDWAGPLLCHLKGLGHASLSSWETLTGSLGSQSIKWRRFLPSEPTLLGFSGQISPGPGSARRGTGPPSASDLRAPGHSPGHSPAHLPRPRPPRAPAGSAPAICPTGRAPSWPAPARHDRCPPLAFLTQGLRWLRSPGSCRQGQEGSGTWKMRPLAGAPVPKRQKCDHWTPCPSDTYAYRLLSGGGRSKYAKICFEDNLLMGEQLGNVARGINIAIVNYVTGNVTATRCFDMYEGDNSGPMTKFIQSAAPKSLLFMVTYDDGSTRLNNDAKNAIEALGSKEIRNMKFRSSWVFIAAKGLELPSEIQREKINHSDAKNNRYSGWPAEIQIEGCIPKERS

SEQ ID NO: 286 - protein, 173 aa, Homo sapien
MRPLAGGLLKVVFVVFASLCAWYSGYLLAELIPDAPLSSAAYSIRSIGERPVLKAPVPKRQKCDHWTPCPSDTYAYRLLSGGGRSKYAKICFEDNLLMGEQLGNVARGINIAIVNYVTGNVTATRCFDMYEGGKKIFSVKIQMNFKQKIKIKKHKEKCQPFLFCLLEKRQQLS

SEQ ID NO: 287 - protein, 133 aa, Homo sapien
  MISC_FEATURE (62)..(62): x=any amino acid
MNHTVQTFFSPVNSGQPLNYEMLKEEHEVAVPGVPHNPALPTSTVIHIRSETSYLDHRAMTXNFCRFKYPHNQGNITGAYSVKSRDRKMVGDVTGAQAYASTAKCLNIWALILGILMTILLIVIPVLIFQAYG

SEQ ID NO: 288 - protein, 332 aa, Homo sapien
MANRDTGENLTRENLSSPALLLCACLLPPLTMTTSIRQFTSSSSIKGSSGLGGGSSRTSCRLSGGLGAGSCRLGSAGGLGSTLGGSSYSSCYSFGSGGGYGSSFGGVDGLLAGGEKATMQNLNDRLASYLDKVRALEEANTELEVKIRDWYQRQAPGPARDYSQYYRTIEELQNKILTATVDNANILLQIDNARLAADDFRTKFETEQALRLSVEADINGLRRVLDELTLARADLEMQIENLKEELAYLKKNHEEEMNALEASGGETTRRMLLAQGDERSQKGRLKKGKTTERMAQQRKRRTTDGKKDRNARGETQNSGKEPSGLFCYLEQL

SEQ ID NO: 289 - protein, 262 aa, Homo sapien
  MISC_FEATURE (253)..(253): x=any amino acid
  MISC_FEATURE (260)..(260): x=any amino acid
QRYRRKFNTRESLLSSPSPVCLPPAAATMTTSIRQFTSSSSIKGSSGLGGGSSRTSCRLSGGLGAGSCRLGSAGGLGSTLGGSSYSSCYSFGSGGGYGSSFGGVDGLLAGGEKATMQNLNDRLASYLDKVRALEEANTELEVKIRDWYQRQAPGPARDYSQYYRTIEELQNKILTATVDNANILLQIDNARLAADDFRTKFETEQALRLSVEADINGLRRVLDELTLARADLEMQIEKPQGGAGLPEEEPRGXDERPGGXWW

SEQ ID NO: 290 - protein, 190 aa, Homo sapien
MYLLHNSQEMLRSMVLNWHLLGLAEYREKVETELQGVCDTVLGLLDSHLIKEAGDAESRVFYLKMKGDYYRYLAEVATGDDKKRIIDSARSAYQEAMDISKKEMPPTNPIRLGLALNFSVFHYEIANSPEEAISLAKTTFDEAMADLHTLSEDSYKDSTLIMQLLRDNLTLWTADNAGEEGGEAPQEPQS

SEQ ID NO: 291 - protein, 174 aa, Homo sapien
IGICWVWPEYREKVETELQGVCDTVLGLLDSHLIKEAGDAESRVFYLKMKGDYYRYLAEVATGDDKKRIIDSARSAYQEAMDISKKEMPPTNPIRLGLALNFSVFHYEIANSPEEAISLAKTTFDEAMADLHTLSEDSYKDSTLIMQLLRDNLTLWTADNAGEEGGEAPQEPQS

SEQ ID NO: 292 - protein, 241 aa, Homo sapien
RLPLLHHPCLTIIFPPKAVTSSTPIPRALGTQPLAKSPQAGSGLNPAVSTPRKHTDVFNWKVRAGSDKLGSFPSLAVAKIIIIEFNPMYPKDNDIALMKLQFPLTFSGTVRPICLPFFDEELTPATPLWIIGWGFTKQNGGKMSDILLQASVQVIDSTRCNADDAYQGEVTEKMMCAGIPEGGVDTCQGDSGGPLMYQSDQWHVVGIVSWGYGCGGPSTPGVYTKVSAYLNWIYNVWKAEL

SEQ ID NO: 293 - protein, 222 aa, Homo sapien
HPAPRSLGPWGPSLWQSLLRLGSGLNPAVSTPRKHTDVFNWKVRAGSDKLGSFPSLAVAKIIIIEFNPMYPKDNDIALMKLQFPLTFSGTVRPICLPFFDEELTPATPLWIIGWGFTKQNGGKMSDILLQASVQVIDSTRCNADDAYQGEVTEKMMCAGIPEGGVDTCQGDSGGPLMYQSDQWHVVGIVSWGYGCGGPSTPGVYTKVSAYLNWIYNVWKAEL

SEQ ID NO: 294 - protein, 218 aa, Homo sapien
  MISC_FEATURE (210)..(210): x=any amino acid
MAVASAAAAALVVALGEDMVVALVLASVVAWVLALGVDGLLAGGEKATMQNLNDRLASYLDKVRALEEANTELEVKIRDWYQRQAPGPARDYSQYYRTIEELQNKILTATVDNANILLQIDNARLAADDFRTKFETEQALRLSVEADINGLRRVLDELTLARADLEMQIENLKGGAGLTEEEPRGGDERPGKQVGGEINVEKDAAPGLDXSRILNEMR

SEQ ID NO: 295 - protein, 303 aa, Homo sapien
  MISC_FEATURE (296)..(296): x=any amino acid
APFLLSANCSLAHLPPWHHDHLQPPVHLLQLHEGLLRHRRRHRGRLQPHLLRPGRRVLPCPQHLRGRPVCHPLASPLGEPAGWGAAMAVASAAAAALVVALGEDMVVALVLASVVAWVLALGVDGLLAGGEKATMQNLNDRLASYLDKVRALEEANTELEVKIRDWYQRQAPGPARDYSQYYRTIEELQNKILTATVDNANILLQIDNARLAADDFRTKFETEQALRLSVEADINGLRRVLDELTLARADLEMQIENLKGGAGLTEEEPRGGDERPGSRWVVRSMWRRTLPQAWTXAASSTRC

SEQ ID NO: 296 - protein, 103 aa, Homo sapien
ANTPHSSTLLNAWGSAHCPSQRATLVFKAHISLGYDNTENLATTTPQGWWSLTGPPLASKGGKETPGANQPHAQSTQRGEEERRAPHCLGESHLHTTLSPPPH

SEQ ID NO: 297 - protein, 91 aa, Homo sapien
RDPWSQPAPRTEHTKRKEEKTPHCWGGPCHHTQSPTTLNLPSSQLPCRPLEEGRGLGSRTLSCTINKVPCAQPKKKKKKGGVMSGGGNKGT

SEQ ID NO: 298 - protein, 256 aa, Homo sapien
MGVNHEKYDNSLKIISNASCTTNCLAPLAKVIHDNFGIVEGLMTTVHAITATQKTVDGPSGKLWRDGRGALQNIIPASTGAAKAVGKVIPELNGKLTGMAFRVPTANVSVVDLTCRLEKPAKYDDIKKVVKQASEGPLKGILGYTEHQVVSSDFNSDTHSSTFDAGAGIALNDHFVKLISWYDNEFGYSNRVVDLMATWLKSRPWTQPESQRERDLTVGVLHIRPTKDSPPGRNLKGEGPGGPKPGPKKGGIRHPP

SEQ ID NO: 299 - protein, 351 aa, Homo sapien
  MISC_FEATURE (304)..(304): x=any amino acid
  MISC_FEATURE (306)..(309): x=any amino acid
  MISC_FEATURE (311)..(311): x=any amino acid
  MISC_FEATURE (314)..(314): x=any amino acid
  MISC_FEATURE (317)..(318): x=any amino acid
  MISC_FEATURE (324)..(324): x=any amino acid
LRLRYEAGVQAENGKLVINGNPITIFQERDPSKIKWGDAGAEYVVESTGVFTTMEKAGAHLQGGAKRVIISAPSADAPMFVMGVNHEKYDNSLKIISNASCTTNCLAPLAKVIHDNFGIVEGLMTTVHAITATQKTVDGPSGKLWRDGRGALQNIIPASTGAAKAVGKVIPELNGKLTGMAFRVPTANVSVVDLTCRLEKPAKYDDIKKVVKQASEGPLKGILGYTEHQVVSSDFNSDTHSSTFDAGAGIALNDHFVKLISWYDNEFGYSNRVVDLMATWLKSRPWTQPESQRERDSLWEPAIXPXXXXPXADXKGXXPVPKPXQKRGESGTPLKPRENGAGKGGLWTHYG

SEQ ID NO: 300 - protein, 432 aa, Homo sapien
MTTTFLQTSSSTFGGGSTRGGSLLAGGGGFGGGSLSGGGGSRSISASSARFVSSGSGGGYGGGMRVCGFGGGAGSVFGGGFGGGVGGGFGGGFGGGDGGLLSGNEKITMQNLNDRLASYLDKVRALEEANADLEVKIHDWYQKQTPASPECDYSQYFKTIEELRDKIMATTIDNSRVILEIDNARLAADDFRLKCAPPSLSSSCMPTLLGLLLALTQAAKTPPTSFFGLPLLRYENELALRQGVEADINGLRRVLDELTLARTDLEMQIEGLNEELAYLKKNHEEEMKEFSSQLAGQVNVEMDAAPGVDLTRVLAEMREQYEAMAEKNRRDVEAWFFSKTEELNKEVASNTEMIQTSKTEITDLRRTMQELEIELQSQLSMKAGLENSLAETECRYATQLQQIQGLIGGLEAQLSELRCEMEAQNQEVQDAA

SEQ ID NO: 301 - protein, 360 aa, Homo sapien
RSMTGTRSRPQPAQNATTANTSRPLKSSGTRSWPPPSTTPGSSWRSTMPGWLRTTSGSSALPRLSPLPALPTLLGLLLALTQAAKTPPTSFFGLPLLRYENELALRQGVEADINGLRRVLDELTLARTDLEMQIEGLNEELAYLKKNHEEEMKEFSSQLAGQVNVEMDAAPGVDLTRVLAEMREQYEAMAEKNRRDVEAWFFSKTEELNKEVASNTEMIQTSKTEITDLRRTMQELEIELQSQLSMKAGLENSLAETECRYATQLQQIQGLIGGLEAQLSELRCEMEAQNQEYKMLLDIKTRLEQEIATYRSLLEGQDAKMAGIGIREASSGGGGSSSNFHINVEESVDGQVVSSHKREI

SEQ ID NO: 302 - protein, 393 aa, Homo sapien
MTTTFLQTSSSTFGGGSTRGGSLLAGGGGFGGGSLSGGGGSRSISASSARFVSSGSGGGYGGGMRVCGFGGGAGSVFGGGFGGGVGGGFGGGFGGGDGGLLSGNEKITMQNLNDRLASYLDKVRALEEANADLEVKIHDWYQKQTPASPECDYSQYFKTIEELRDKIMATTIDNSRVILEIDNARLAADDFRLKYENELALRQGVEADINGLRRVLDELTLARTDLEMQIEGLNEELAYLKKNHEEEMKEFSSQLAGQVNVEMDAAPGVDLTRVLAEMREQYEAMAEKNRRDVEAWFFSKTEELNKEVASNTEMIQTSKTEITDLRRTMQELEIELQSQLSMKAGLENSLAETECRYATQLQQIQGLIGGLEAQLSELRCEMEAQNQEVQDAA

SEQ ID NO: 303 - protein, 499 aa, Homo sapien
ELTGSSYLAMTTTFLQTSSSTFGGGSTRGGSLLAGGGGFGGGSLSGGGGSRSISASSARFVSSGSGGGYGGGMRVCGFGGGAGSVFGGGFGGGVGGGFGGGFGGGDGGLLSGNEKITMQNLNDRLASYLDKVRALEEANADLEVKIHDWYQKQTPASPECDYSQYFKTIEELRDKIMATTIDNSRVILEIDNARLAADDFRLKYENELALRQGVEADINGLRRVLDELTLARTDLEMQIEGLNEELAYLKKNHEEEMKEFSSQLAGQVNVEMDAAPGVDLTRVLAEMREQYEAMAEKNRRDVEAWFFSKTEELNKEVASNTEMIQTSKTEITDLRRTMQELEIELQSQLSMKAGLENSLAETECRYATQLQQIQGLIGGLEAQLSELRCEMEAQNQEYKMLLDIKTRLEQEIATYRSLLEGQDAKMAGIGIREDVPCHSPLSSGQVEDWPEGLHMQTPVPAFRELKRVPRSFISGLCMRSIPPLPLPTFFGARRCSCIV

SEQ ID NO: 304 - protein, 458 aa, Homo sapien
ELTGSSYLAMTTTFLQTSSSTFGGGSTRGGSLLAGGGGFGGGSLSGGGGSRSISASSARFVSSGSGGGYGGGMRVCGFGGGAGSVFGGGFGGGVGGGFGGGFGGGDGGLLSGNEKITMQNLNDRLASYLDKVRALEEANADLEVKIHDWYQKQTPASPECDYSQYFKTIEELRDKIMATTIDNSRVILEIDNARLAADDFRLKYENELALRQGVEADINGLRRVLDELTLARTDLEMQIEGLNEELAYLKKNHEEEMKEFSSQLAGQVNVEMDAAPGVDLTRVLAEMREQYEAMAEKNRRDVEAWFFSKTEELNKEVASNTEMIQTSKTEITDLRRTMQELEIELQSQLSMKAGLENSLAETECRYATQLQQIQGLIGGLEAQLSELRCEMEAQNQEYKMLLDIKTRLEQEIATYRSLLEGQDAKMAGIGIREGLCMRSIPPLPLPTFFGARRCSCIV

SEQ ID NO: 305 - protein, 281 aa, Homo sapien
MTTTFLQTSSSTFGGGSTRGGSLLAGGGGFGGGSLSGGGGSRSISASSARFVSSGSGGGYGGGMRVCGFGGGAGSVFGGGFGGGVGGGFGGGFGGGDGGLLSGNEKITMQNLNDRLASYLDKVRALEEANADLEVKIHDWYQKQTPASPECDYSQYFKTIEELRDKIMATTIDNSRVILEIDNARLAADDFRLKYENELALRQGVEADINGLRRVLDELTLARTDLEMQIEGEGLHMQTPVPAFRELKRVPRSFISGLCMRSIPPLPLPTFFGARRCSCIV

SEQ ID NO: 306 - protein, 49 aa, Homo sapien
GRLLLLNSRPRRQICLHHLLLPEELQELRTCCKSLPSKCSNPAHGDCLF

SEQ ID NO: 307 - protein, 98 aa, Homo sapien
AVAQAMFYPFLESSLDQANCRTTFFGSQESPIPSPWSPVPQFYILLQISLQVSHSMAPADTRTQSFPKSKSSKQNPHPNPKFCFGSNYLQNVFNKMLL

SEQ ID NO: 308 - protein, 226 aa, Homo sapien
MCRATDPRCPPCSSDHGQHGVMGVHTGADTRGQYLTYLLYRWEQGGSGGHSQNYTAFNRWQNWGSDPDLGSSHSWCDCGSSFPHLGLAISLSEWTWRGRGPSSWMAAGIKSSLGLARRRACGWWTGMPGSSPGSLLPSNRLSLVPLVPSASMTRLMRSRTASGSSVTSLDGTRSRSHTSEGTRSRSHTSEGTRSRSHTSEGAHLDITPNSGAAGNSAGPKSMEVSC

SEQ ID NO: 309 - protein, 208 aa, Homo sapien
MKLLSLVAVVGCLLVPPAEANKVREVSLQHLVTTTVHGHPVYRADSESSEDIRCKCICPPYRNISGHIYNQNVSQKDCNCLHVVEPMPVPGHDVEAYCLLCECRYEERSTTTIKVIIVIYLSVVGALLLYMAFLMLVDPLIRKPDAYTEQLHNEEENEDARSMAAAAASLGGPRANTVLERVEGAQQRWKLQVQEQRKTVFDRHKMLS

SEQ ID NO: 310 - protein, 170 aa, Homo sapien
MTRQGPQPAALGEAQPPSLGKVRLWGSFFPCQTFRIQDPSGLPCQIFSFFLPTTGCSLYGSSCCIPRGTPSKHSPGACGRCPAAVEAAGAGAAEDSLRSAQDAQLDGLVWLGQGPNTMAASFQAGQSRGLLLPSLGSSLPFKSLWHFSSFSLTLEMLYLAILIREEGCGL

SEQ ID NO: 311 - protein, 67 aa, Homo sapien
PQVCWNSPLAWSRPRYRRLLEGESEGTREESKSSMKVSATPKIKAITQETINGRLVLCQVNEIQKHA

SEQ ID NO: 312 - protein, 32 aa, Homo sapien
PQVCWNSPLAWSRPSTALKEKRNKKEVETTKV

SEQ ID NO: 313 - protein, 74 aa, Homo sapien
AAGVLEFALSVVAAEYCFEGEKEQERGRNNKSLTLFSPVFPNIFDLETCFLRLPLISHRKVPGDCSLGQVALSD

SEQ ID NO: 314 - protein, 66 aa, Homo sapien
MHVERRSVMDSGRPGRWQGSVAGSLSSLESATTDSDLDYDYLQNWGPRFKKLADLYGSKDTFDDDS

SEQ ID NO: 315 - protein, 94 aa, Homo sapien
TSSLASQRLKMNSDAFILLLYMNRALRTSPVSFHSILLSVHDAPATLAIFRFLIQKKTRSFSMESRSPLLFCIDDNSLNLFCFLALCMCVGGWD

SEQ ID NO: 316 - protein, 30 aa, Homo sapien
YALIGTGLYLERRQCDGCVVAAEVDLVLRN

SEQ ID NO: 317 - protein, 94 aa, Homo sapien; identical to SEQ ID NO: 315

SEQ ID NO: 318 - protein, 147 aa, Homo sapien [sequence omitted]

SEQ ID NO: 319 - protein, 353 aa, Homo sapien
MDHHFIAEFKRTHKKDISENKRAVRRLRTACERAKRTLSSSTQASIEIDSLYEGIDFYTSITRARFEELNADLFRGTLDPVEKALRDAKLDKSQIHDIVLVGGSTRIPKIQKLLQDFFNGKELNKSINPDEAVAYGAAVQAAILSGDKSENVQDLLLLDVTPLSLGIETAGGVMTVLIKRNTTIPTKQTQTFTTYSDNQPGVLIQVYEGERAMTKDNNLLGKFELTGIPPAPRGVPQIEVTFDIDANGILNVSAVDKSTGKENKITITNDKGRLSKEDIERMVQEAEKYKAEDEKQRDKVSSKNSLESYAFNMKATVEDENFRQITVRQQSSWQGYEYQLADKISSGGGFDIT

SEQ ID NO: 320 - protein, 205 aa, Homo sapien
  MISC_FEATURE (201)..(201): x=any amino acid
  MISC_FEATURE (204)..(204): x=any amino acid
QLLLMGAAVQAAILSGDKSENVQDLLLLDVTPLSLGIETAGGVMTVLIKRNTTIPTKQTQTFTTYSDNQPGVLIQVYEGERAMTKDNNLLGKFELTGIPPAPRGVPQIEVTFDIDANGILNVSAVDKSTGKENKITITNDKGRLSKEDIERMVQEAEKYKAEDEKQRDKVSSKNSLESYAFNMKATVEDENFRQITVRQQXSGXL

SEQ ID NO: 321 - protein, 118 aa, Homo sapien
MCPRCMLERRSVMDGRGRGGGPASGHHSGPSLHAENHTSQTFTQHFLPQSQKMHKEEHEVAVLGAPPSTILPRSTVINIHSETSVPDHVVWSLFNTLFMNPCCLNWCCLGFNSIRLTP

SEQ ID NO: 322 - protein, 183 aa, Homo sapien
RVDSYSECALDHARAAQCDGWSRARGGPASGHHSGPSLHAENHTSQTFTQHFLPQSQKMHKEEHEVAVLGAPPSTILPRSTVINIHSETSVPDHVVWSLFNTLFLNWCCLGFIAFAYSVKSRDRKMVGDVTGAQAYASTAKCLNIWALILGILMTIGFILLLVFGSVTVYHIMLQIIQEKRGY

SEQ ID NO: 323 - protein, 87 aa, Homo sapien
MNHTVQTFFSPVNSGQPPNYEMHKEEHEVAVLGAPPSTILPRSTVINIHSETSVPDHVVWSLFNTLFMNPCCLNWCCLGFNSIRLTP

SEQ ID NO: 324 - protein, 156 aa, Homo sapien
PDRRWSSLDTMNHTVQTFFSPVNSGQPPNYEMHKEEHEVAVLGAPPSTILPRSTVINIHSETSVPDHVVWSLFNTLFLNWCCLGFIAFAYSVKSRDRKMVGDVTGAQAYASTAKCLNIWALILGILMTIGFILLLVFGSVTVYHIMLQIIQEKRGY

SEQ ID NO: 325 - protein, 76 aa, Homo sapien
MHARAAQCDGSWSRPSVVEAGHLELRQSRRRNGEDSGGGGRPGWDEVWWWVVSLGGDCILQHLNSVCLLCETSADH

SEQ ID NO: 326 - protein, 105 aa, Homo sapien
DPSIFLKSPLGWLRGRGLGVGGLSRSDCRDRLVCSVNTNKIDLLSGKRKRKEKKTLCGITQWVIRRVPVGWTLVFPGSQFPAQHMSTNGETTRAAGGQWKKRTHG

SEQ ID NO: 327 - protein, 109 aa, Homo sapien
MPSAMTVYALVVVSYFLITGGIIYDVIVEPPSVGSMTDEHGHQRPVAFLAYRVNGQYIMEGLASSFLFTMGGLGFIILDRSNAPNIPKLNRFLLLFMWIRLCPIEFFHG

SEQ ID NO: 328 - protein, 153 aa, Homo sapien
PLAWSRPRYRVPFLVLECPNLKLKKPPWLHMPSAMTVYALVVVSYFLITGGIIYDVIVEPPSVGSMTDEHGHQRPVAFLAYRVNGQYIMEGLASSFLFTMGGLGFIILDRSNAPNIPKLNRFLLLFIGFVCVLLSFFMARVFMRMKLPGYLMG

SEQ ID NO: 329 - protein, 61 aa, Homo sapien
LLGRAGLFPGGAWGLRPRTALAATNMETLYRVPFLVLECPNLKLKKPPWLHMPSAMTVNNL

SEQ ID NO: 330 - protein, 102 aa, Homo sapien
IIYDVIVEPPSVGSMTDEHGHQRPVAFLAYRVNGQYIMEGLASSFLFTMGGLGFIILDRSNAPNIPKLNRFLLLFIGFVCVLLSFFMARVFMRMKLPGYLMG

SEQ ID NO: 331 - protein, 83 aa, Homo sapien
METLYRVPFLVLECPNLKLKKPPWLHMPSAMTVYALVVVSYFLITGGIIYDVIVEPPSVGSMTDEHGHQRPVAFLAYRGYLMG

SEQ ID NO: 332 - protein, 123 aa, Homo sapien
MPSAMTVYALVVVSYFLITGGIIYDVIVEPPSVGSMTDEHGHQRPVAFLAYRVNGQYIMEGLASSFLFTMGGLGFIILDRSNAPNIPKLNRFLLLFIGFVCVLLSFFMARVFMRMKLPGYLMG

SEQ ID NO: 333 - protein, 83 aa, Homo sapien; identical to SEQ ID NO: 331

SEQ ID NO: 334 - protein, 95 aa, Homo sapien
MTELETAMGMIIDVFSRYSGSEGSTQTLTKGELKVLMEKELPGFLQSGKDKDAVDKLLKDLDANGDAQVDFSEFIVFVAAITSACHKYFEKAGLK

SEQ ID NO: 335 - protein, 184 aa, Homo sapien
IQSQCLGGAHPSKCKSSRGVTELANRLVCLVFLLHVDIILLILLPGPPQGYRKVKSSPEPIMSSLLTEGTCPATARVAAREEGGSESSTMTELETAMGMIIDVFSRYSGSEGSTQTLTKGELKVLMEKELPGFLQSGKDKDAVDKLLKDLDANGDAQVDFSEFIVFVAAITSACHKYFEKAGLK

SEQ ID NO: 336 - protein, 64 aa, Homo sapien
CRIRRARHESPGLRKGTSLLRSNTQKGRFFQGCRIVGSGPKWLMAPSKTFIFNNVKDLRIKRIG

SEQ ID NO: 337 - protein, 51 aa, Homo sapien
SSEIPKNSCNVRVRKDGVYSSLHFYGEIKSFSNELKKKKKGGRSRSRTSFF

SEQ ID NO: 338 - protein, 140 aa, Homo sapien
PCGPRLPFKRAGPAPAAPHRGDQEARWFSGAAPSRLPPAPRFSGPAAIFLSAQGPPSGAMQPTLLLSLLGAVGLAAVNSMPVDNRNHNEGMVTRCIIEVLSNALSKSSAPPITPECRQVLKTKKRTRKLGCNGFGTTEDS

SEQ ID NO: 339 - protein, 141 aa, Homo sapien
MKGDYYRYLAEVAAGDEPERDWPIRSTQSIPKGKAFEISKKEMQPTHPIRLGLALNFSVFYYEILNSPEKAWSLAKTAFDEAIAELDTLSEESYKDSTLIMQLLRDNLTLWTSDTQGDEAEAGEGGENSAGLSKVLSASVS

SEQ ID NO: 340 - protein, 122 aa, Homo sapien
  MISC_FEATURE (83)..(83): x=any amino acid
  MISC_FEATURE (117)..(117): x=any amino acid
ARAPAGEKIETELRDICNQCTVSLRKVLDPNASQAESKVFYLKMKGDYYRYLAEVAAGDEPERDWPIRSTQSIPKGKAFEISXKEMQPTHPIRLGLALNFSVFYYEILNSPEKAWSXCKDSF

SEQ ID NO: 341 - protein, 51 aa, Homo sapien
  MISC_FEATURE (5)..(5): x=any amino acid
GRGRXRATCLSGRCWARTVEMSEKKQPVDLGLLEEDDEFEEFPAEGLGWLR

SEQ ID NO: 342 - protein, 90 aa, Homo sapien
  MISC_FEATURE (5)..(5): x=any amino acid
GRGRXRATCLSGRCWARTVEMSEKKQPVDLGLLEEDDEFEEFPAEDWAGLDEDEDAHVWEDNWDDDNVEDDFSNQLRAELEKHGYKMETS

SEQ ID NO: 343 - protein, 44 aa, Homo sapien
LAWSRPRCGSDGGVSLRKSEGSNFSAYLGGVGRGQSRCQRKSSR

SEQ ID NO: 344 - protein, 88 aa, Homo sapien
KKKKKKHPKLVLSLSLSPRVEALAGMGGHKLGPQPAQSAHSDLGGKLGGTPGTHYHAGAGRSRCTQGIPPTAEGSRNSTSPTILHQTV

SEQ ID NO: 345 - protein, 680 aa, Homo sapien
MALEIHMSDPMCLIENFNEQLKVNQEALEILSAITQPVVVVAIVGLYRTGKSYLMNKLAGKNKGFSVASTVQSHTKGIWIWCVPHPNWPNHTLVLLDTEGLGDVEKADNKNDIQIFALALLLSSTFVYNTVNKIDQGAIDLLHNVTELTDLLKARNSPDLDRVEDPADSASFFPDLVWTLRDFCLGLEIDGQLVTPDEYLENSLRPKQGSDQRVQNFNLPRLCIQKFFPKKKCFIFDLPAHQKKLAQLETLPDDELEPEFVQQVTEFCSYIFSHSMTKTLPGGIMVNGSRLKNLVLTYVNAISSGDLPCIENAVLALAQRENSAAVQKAIAHYDQQMGQKVQLPMETLQELLDLHRTSEREAIEVFMKNSFKDVDQSFQKELETLLDAKQNDICKRNLEASSDYCSALLKDIFGPLEEAVKQGIYSKPGGHNLFIQKTEELKAKYYREPRKGIQAEEVLQKYLKSKESVSHAILQTDQALTETEKKKKGEKKVEIMQDRKKSINFKLNLAWPSWDVKLEQEWQRCFLAPQAYLTGMILHCGYLEGKNNPWEFYPGSWNNHKQKWEAEGRGTLILEKIIFFSSEAQVKAEAEKAEAQRLAAIQRQNEQMMQERERLHQEQVRQMEIAKQNWLAEQQKMQEQQMQEQAAQLSTTFQAQNRSLLSELQHAQRTVNNDDPCVLL

SEQ ID NO: 346 - protein, 544 aa, Homo sapien
IITSRCPYLSSGKIILASAAYKSGNQNSTYIRQSNILDMALEIHMSDPMCLIENFNEQLKVNQEALEILSAITQPVVVVAIVGLYRTGKSYLMNKLAGKNKGFSVASTVQSHTKGIWIWCVPHPNWPNHTLVLLDTEGLGDVEKADNKNDIQIFALALLLSSTFVYNTVNKIDQGAIDLLHNVTELTDLLKARNSPDLDRVEDPADSASFFPDLVWTLRDFCLGLEIDGQLVTPDEYLENSLRPKQGSDQRVQNFNLPRLCIQKFFPKKKCFIFDLPAHQKKLAQLETLPDDELEPEFVQQVTEFCSYIFSHSMTKTLPGGIMVNGSRLKNLVLTYVNAISSGDLPCIENAVLALAQRENSAAVQKAIAHYDQQMGQKVQLPMETLQELLDLHRTSEREAIEVFMKNSFKDVDQSFQKELETLLDAKQNDICKRNLEASSDYCSALLKDIFGPLEEAVKQGIYSKPGGHNLFIQKTEELKAKYYREPRKGIQAEEVLQKYLKSKESVSHAILQTDQALTETEKKKKGEKKVEIMQDRKKSINFK

SEQ ID NO: 347 - protein, 487 aa, Homo sapien
MVWQCCLMLLERRSVMDGRPGRAWSRPRYNTVNKIDQGAIDLLHNVTELTDLLKARNSPDLDRVEDPADSASFFPDLVWTLRDFCLGLEIDGQLVTPDEYLENSLRPKQGSDQRVQNFNLPRLCIQKFFPKKKCFIFDLPAHQKKLAQLETLPDDELEPEFVQQVTEFCSYIFSHSMTKTLPGGIMVNGSRLKNLVLTYVNAISSGDLPCIENAVLALAQRENSAAVQKAIAHYDQQMGQKVQLPMETLQELLDLHRTSEREAIEVFMKNSFKDVDQSFQKELETLLDAKQNDICKRNLEASSDYCSALLKDIFGPLEEAVKQGIYSKPGGHNLFIQKTEELKAKYYREPRKGIQAEEVLQKYLKSKESVSHAILQTDQALTETEKKKKEAQVKAEAEKAEAQRLAAIQRQNEQMMQERERLHQEQVRQMEIAKQNWLAEQQKMQEQQMQEQAAQLSTTFQAQNRSLLSELQHAQRTVNNDDPCVLL

SEQ ID NO: 348 - protein, 472 aa, Homo sapien
WIGRPGRAWSRPRYNTVNKIDQGAIDLLHNVTELTDLLKARNSPDLDRVEDPADSASFFPDLVWTLRDFCLGLEIDGQLVTPDEYLENSLRPKQGSDQRVQNFNLPRLCIQKFFPKKKCFIFDLPAHQKKLAQLETLPDDELEPEFVQQVTEFCSYIFSHSMTKTLPGGIMVNGSRLKNLVLTYVNAISSGDLPCIENAVLALAQRENSAAVQKAIAHYDQQMGQKVQLPMETLQELLDLHRTSEREAIEVFMKNSFKDVDQSFQKELETLLDAKQNDICKRNLEASSDYCSALLKDIFGPLEEAVKQGIYSKPGGHNLFIQKTEELKAKYYREPRKGIQAEEVLQKYLKSKESVSHAILQTDQALTETEKKKKEAQVKAEAEKAEAQRLAAIQRQNEQMMQERERLHQEQVRQMEIAKQNWLAEQQKMQEQQMQEQAAQLSTTFQAQNRSLLSELQHAQRTVNNDDPCVLL

SEQ ID NO: 349 - protein, 401 aa, Homo sapien
MGGDLVLGLGALRRRKRLLEQEKSLAGWALVLAGTGIGLMVLHAEMLWFGGCSWALYLFLVKCTISISTFLLLCLIVAFHAKEVQLFMTDNGLRDWRVALTGRQAAQIVLELVVCGLHPAPVRGPPCVQDLGAPLTSPQPWPGFLGQGEALLSLAMLLRLYLVPRAVLLRSGVLLNASYRSIGALNQVRFRHWFVAKLYMNTHPGRLLLGLTLGLWLTTAWVLSVAERQAVNATGHLSDTLWLIPITFLTIGYGDVVPGTMWGKIVCLCTGVMGVCCTALLVAVVARKLEFNKAEKHVHNFMMDIQYTKEMKESAARVLQEAWMFYKHTRRKESHAARRHQRKLLAAINARAALYAHVSMCTHVQVTSLHGCVCACPCLSRSGHPGVVSLNIQVSPGSDRA

SEQ ID NO: 350 - protein, 134 aa, Homo sapien
MAGRQGRLFSSALALSGGKDSVRGWTGSEGRWCTLSPSLTLDGLLPLCLVSLSLSACPGHIVWLSIQCLCLNALLPPGLGARKHLPPVSHFCPPVSVCTSVCPTLTLPLPGLPLHQSLCLSRTHEEEPGYFPQY

SEQ ID NO: 351 - protein, 161 aa, Homo sapien
GGWDLGRKASWRKGSCGQHPMWLRGRGMAGRQGRLFSSALALSGGKDSVRGWTGSEGRWCTLSPSLTLDGLLPLCLVSLSLSACPGHIVWLSIQCLCLNALLPPGLGARKHLPPVSHFCPPVSVCTSVCPTLTLPLPGLPLHQSLCLSRTHEEEPGYFPQY

SEQ ID NO: 352 - protein, 427 aa, Homo sapien
MGGDLVLGLGALRRRKRLLEQEKSLAGWALVLAGTGIGLMVLHAEMLWFGGCSWALYLFLVKCTISISTFLLLCLIVAFHAKEVQLFMTDNGLRDWRVALTGRQAAQIVLELVVCGLHPAPVRGPPCVQDLGAPLTSPQPWPGFLGQGEALLSLAMLLRLYLVPRAVLLRSGVLLNASYRSIGALNQVRFRHWFVAKLYMNTHPGRLLLGLTLGLWLTTAWVLSVAERQAVNATGHLSDTLWLIPITFLTIGYGDVVPGTMWGKIVCLCTGVMGVCCTALLVAVVARKLEFNKAEKHVHNFMMDIQYTKEMKESAARVLQEAWMFYKHTRRKESHAARRHQRKLLAAINAFRQVRLKHRKLREQVNSMVDISKMHMILYDLQQNLSSSHRALEKQIDTLAGKLDALTELLSTALGPRQLPEPSQQSK

SEQ ID NO: 353 - protein, 66 aa, Homo sapien
MHARAAQCDGCGRGEVKAMIETKTGIIPETQIVTCNGKRLEDGKMMADYGIRKGNLLFLASYCIGG

SEQ ID NO: 354 - protein, 74 aa, Homo sapien
DPDCDLQWKETGRWEDDGRLRHQKGQLTLPGILLYWRVTTLGMGCWQGSKSLFLLISYSTNTSSDDFPKLMRMR

SEQ ID NO: 355 - protein, 535 aa, Homo sapien
MPGWIFSVGSSIARRAFLTWQKQAHGPLPLECICLTCLGTAVQEHLVWPGGWEGTTCNIARNSSCLPNPCHNGGTCVVNGESFTCVCKEGWEGPICAQNTNDCSPHPCYNSGTCVDGDNWYRCECAPGFAGPDCRININECQSSPCAFGATCVDEINGYRCVCPPGHSGAKCQEVSGRPCITMGSVIPDGAKWDDDCNTCQCLNGRIACSKVWCGPRPCLLHKGHSECPSGQSCIPILDDQCFVHPCTGVGECRSSSLQPVKTKCTSDSYYQDNCANITFTFNKEMMSPGLTTEHICSELRNLNILKNVSAEYSIYIACEPSPSANNEIHVAISAEDIRDDGNPIKEITDKIIDLVSKRDGNSSLIAAVAEVRVQRRPLKNRTDFLVPLLSSVLTVAWICCLVTAFYWCLRKRRKPGSHTHSASEDNTTNNVREQLNQIKNPIEKHGANTVPIKDYENKNSKMSKIRTHNSEVEEDDMDKHQQKARFAKQPAYTLVDREEKPPNGTPTKHPNWTNKQDNRDLESAQSLNRMEYIV

SEQ ID NO: 356 - protein, 209 aa, Homo sapien
MLYIYQHTTSASNKKELELDICQRLPEIRWKLFLLIFLIRFYMRTNPFYPEVELNFISVFWPQLPNGLEAAYEFADRDEVRFFKGNKYWAVQGQNVLHGYPKDIYSSFGFPRTVKHIDAALSEENTGKTYFFVANKYWRYDEYKRSMDPGYPKMIAHDFPGIGHKVDAVFMKDGFFYFFHGTRQYKFDPKTKRILTLQKANSWFNCRKN

SEQ ID NO: 357 - protein, 640 aa, Homo sapien
MKGHRGFDGRNGEKGETGAPGLKGENGLPGENGAPGPMGPRGAPGERGRPGLPGAAGARGNDGARGSDGQPGPPGPPGTAGFPGSPGAKGEVGPAGSPGSNGAPGQRGEPGPQGHAGAQGPPGPPGINGSPGGKGEMGPAGIPGAPGLMGARGPPGPAGANGAPGLRGGAGEPGKNGAKGEPGPRGERGEAGIPGVPGAKGEDGKDGSPGEPGANGLPGAAGERGAPGFRGPAGPNGIPGEKGPAGERGAPGPAGPRGAAGEPGRDGVPGGPGMRGMPGSPGGPGSDGKPGPPGSQGESGRPGPPGPSGPRGQPGVMGFPGPKGNDGAPGKNGERGGPGGPGPQGPPGKNGETGPQGPPGPTGPGGDKGDTGPPGPQGLQGLPGTGGPPGENGKPGEPGPKGDAGAPGAPGGKGDAGAPGERGPPGLAGAPGLRGGAGPPGPEGGKGAAGPPGPPGAAGTPGLQGMPGERGGLGSPWSSQRWFRLQLPAPATSREGSRGGRYYRADDANVVRDRDLEVDTTLKSLSQQIENIRSPEGSRKNPARTCRDLKMCHSDWKSGEYWIDPNQGCNLDAIKVFCNMETGETCVYPTQPSVAQKNWYINKNPKDKRHVWFGESMTDGIPFQFGGQGFDPSDVAIQLT

SEQ ID NO: 358 - protein, 567 aa, Homo sapien
QGPPGEPGQAGPSGPPGPPGAIGPSGPAGKDGESGRPGRPGERGLPGPPGIKGPAGIPGFPGMKGHRGFDGRNGEKGETGAPGLKGENGLPGENGAPGPMGPRGAPGERGRPGLPGAAGARGNDGARGSDGQPGPPGPPGTAGFPGSPGAKGEVGPAGSPGSNGAPGQRGEPGPQGHAGAQGPPGPPGINGSPGGKGEMGPAGIPGAPGLMGARGPPGPAGANGAPGLRGGAGEPGKNGAKGEPGPRGERGEAGIPGVPGAKGEDGKDGSPGEPGANGLPGAAGERGAPGFRGPAGPNGIPGEKGPAGERGAPGPAGPRGAAGEPGRDGVPGGPGMRGMPGSPGGPGSDGKPGPPGSQGESGRPGPPGPSGPRGQPGVMGFPGPKGNDGAPGKNGERGGPGGPGPQGPPGKNGETGPQGPPGPTGPGGDKGDTGPPGPQGLQGLPGTGGPPGENGKPGEPGPKGDAGAPGAPGGKGDAGAPGERGPPGLAGAPGLRGGAGPPGPEGGKGAAGPPGPPGAAGTPGLQGMPGERGGLGSPWSSQRWFRLQLPAPATSREGSRWWPLLPG

SEQ ID NO: 359 - protein, 156 aa, Homo sapien
KLREVARLGGVVSIEDPFDQDDWGAWQKFTASAGIQVVGDDLTVTNPKRIAKAVNEKSCNCLLLKVNQIGSVTESLQACKLAQANGWGVMVSHRSGETEDTFIADLVVGLCTGQIKTGAPCRSERLAKYNQLLRIEEELGSKAKFAGRNFRNPLAK

SEQ ID NO: 360 - protein, 108 aa, Homo sapien
MIRLAIWGRVSLRTHSPWPPCFQPHSWPCPVLSSLGGTCTCRFMAGKPAVTHDVDGSSAPPCGQESWCVDSGVPEPACSGSRVPMLASIAVCSQSAKYSFTVRTGTQA

SEQ ID NO: 361 - protein, 125 aa, Homo sapien
GMSDGSPDEWRGGLTGACPGGGKWVGLALARQEVGAGGADSICGYPEHGDLAGFTFTSVSAAPSASSPRRRDPVARSSPCLFSRSMPGRSLTLAGIPLLRLISSPQKVSSELLCPVVLQLVSMRP

SEQ ID NO: 362 - DNA, 25 bp, Artificial sequence
  Synthetic
gatgtgactcttgcacattatttgc

SEQ ID NO: 363 - DNA, 22 bp, Artificial sequence
  Synthetic
ctgtctggagcctcctttcatt

SEQ ID NO: 364 - DNA, 24 bp, Artificial sequence
  Synthetic
ttgaaagcatcttacagggccaca

SEQ ID NO: 365 - DNA, 23 bp, Artificial sequence
  Synthetic
aaggcctgctcctcttttagaag

SEQ ID NO: 366 - DNA, 23 bp, Artificial sequence
  Synthetic
gagcaatgatcagaggacccttt

SEQ ID NO: 367 - DNA, 25 bp, Artificial sequence
  Synthetic
ccccaagggaagcagaaggtgacag

SEQ ID NO: 368 - DNA, 22 bp, Artificial sequence
  Synthetic
tcttggcatggcttctctagct

SEQ ID NO: 369 - DNA, 25 bp, Artificial sequence
  Synthetic
gatgtagggagaggaagagttctga

SEQ ID NO: 370 - DNA, 27 bp, Artificial sequence
  Synthetic
catccttccctccccctctgtttctga

SEQ ID NO: 371 - DNA, 23 bp, Artificial sequence
  Synthetic
gccgcaataattccatagtcaag

SEQ ID NO: 372 - DNA, 21 bp, Artificial sequence
  Synthetic
caaccagcactccaatcatga

SEQ ID NO: 373 - DNA, 30 bp, Artificial sequence
  Synthetic
gcatctggaacttctcctggtctctcagct

SEQ ID NO: 374 - DNA, 25 bp, Artificial sequence
  Synthetic
gagcatcacagtctctgacagttgt

SEQ ID NO: 375 - DNA, 22 bp, Artificial sequence
  Synthetic
tggctaggatggtctcgatctc

SEQ ID NO: 376 - DNA, 37 bp, Artificial sequence
  Synthetic
tccttaaagcatttgcaacagctacagtctaaaattg

SEQ ID NO: 377 - DNA, 21 bp, Artificial sequence
  Synthetic
acattcagggaccaggcttgt

SEQ ID NO: 378 - DNA, 22 bp, Artificial sequence
  Synthetic
ggtcatacaggatcatgtgcat

SEQ ID NO: 379 - DNA, 24 bp, Artificial sequence
  Synthetic
aaactgactccccacttcttccca
